(19) United States
(12) Patent Application Publication
(10) Pub. No.: US 2023/0106033 A1
(43) Pub. Date: Apr. 6, 2023

(54) STRAIN CAPABLE OF PRODUCING BUTYRIC ACID

(71) Applicant: HIGHER MOUNT CO., LTD., Gifu-shi, Gifu (JP)

(72) Inventors: Hirotaka TAKAYAMA, Gifu-shi (JP); Emi TAKAYAMA, Gifu-shi (JP)

(73) Assignee: HIGHER MOUNT CO., LTD., Gifu-shi, Gifu (JP)

(21) Appl. No.: 17/801,086

(22) PCT Filed: Feb. 16, 2021
(86) PCT No.: PCT/JP2021/005685

§ 371 Date: Aug. 19, 2022

(30) Foreign Application Priority Data
Feb. 21, 2020 (JP) 2020-028498

(51) Int. Cl. C12N 1/20; C12P 7/52

(52) U.S. Cl. CPC C12N 1/205; C12P 7/52; C12R 2001/145

(57) ABSTRACT

A strain that efficiently produces butyric acid and a method for producing butyric acid using the strain. Clostridium beijerinckii SIID27451-B11 strain (Accession No. NITE BP-02951), produces more butyric acid and less lactic acid and acetic acid in a culture solution after anaerobically culturing the strain at 37° C. for 72 hours, compared with Clostridium beijerinckii NBRC 109359T, which is a type strain of Clostridium beijerinckii.

### TECHNICAL FIELD

[0001] This invention relates to a strain having a butyric acid-producing ability and a method for producing butyric acid using the strain.

### BACKGROUND ART

[0002] In recent years, the usefulness of butyric acid has been the focus of much attention. It has become clear that butyric acid is utilized as an energy source in large intestines and may improve immune system disorders by maintaining intestinal flora in healthy state. Butyric acid bacteria (butyric acid-producing bacteria) are a general term for bacteria that produce butyric acid through metabolism. Butyric acid bacteria are a type of intestinal bacteria that produce butyric acid by decomposing dietary fiber in the intestines. Conventionally, Clostridium butyricum has been known as a representative butyric acid-producing bacterium that has been used for applications such as a medicine for intestinal regulation. However, butyric acid-producing bacteria that produce butyric acid more efficiently are needed.

[0003] Also, butyric acid is useful not only for biological applications as mentioned above, but also as a raw material for industrial applications, such as synthesis of fragrances. For such applications, butyric acid-producing bacteria that produce butyric acid more efficiently are also needed.

### SUMMARY OF INVENTION

### Problem to be Solved

[0004] The objective of the present invention is to provide a strain that efficiently produces butyric acid and a method for producing butyric acid using the strain.

### Solution to Problem

[0005] In the process of producing fermented liquid containing short-chain fatty acids such as butyric acid, propionic acid, and lactic acid by fermenting various natural raw materials, such as soybeans and crude drugs, the inventors have found and isolated SIID27451-B11 strain (accession number NITE BP-02951). The SIID27451-B11 strain was identified as a strain of Clostridium beijerinckii.

[0006] Thus, the present invention provides Clostridium beijerinckii SIID27451-B11 strain (accession number NITE BP-02951).

[0007] The present invention also provides Clostridium beijerinckii SIID27451-B11 strain having genome sequences shown in sequence numbers 1 to 5.

[0008] The present invention also provides Clostridium beijerinckii SIID27451-B11 strain having a 16S rDNA sequence shown in sequence number 6.

[0009] The present invention also provides Clostridium beijerinckii SIID27451-B11 strain which produces more butyric acid and less lactic acid and acetic acid in a culture solution after anaerobically culturing the strain at 37° C. for 72 hours, compared with Clostridium beijerinckii NBRC 109359T, which is a type strain of Clostridium beijerinckii.

[0010] Furthermore, the present invention provides a method for producing butyric acid using SIID27451-B11 strain.

### Effects of the Invention

[0011] According to the present invention, a butyric acid-producing bacterium is provided that produces butyric acid more efficiently than Clostridium butyricum, which is a typical conventional butyric acid-producing bacterium, as well as more efficiently produces butyric acid compared with a type strain of Clostridium beijerinckii.

### BRIEF DESCRIPTION OF DRAWING

[0012] FIG. 1 is a photograph showing a colony image of SIID27451-B11 strain.

[0013] FIG. 2 is a photograph showing a Gram staining image of SIID27451-B11 strain

[0014] FIG. 3 shows a simple molecular phylogenetic tree based on a 16S rDNA partial sequence of SIID27451-B11 strain.

### DESCRIPTION OF EMBODIMENTS

[0015] The taxonomic characteristics of SIID27451-B11 strain were examined. Hereafter, SIID27451-B11 strain will be also referred to as B11 strain. All the following tests were performed at TechnoSuruga Laboratory Co, Ltd. unless otherwise noted.

[0016] (1) Morphological Observation

[0017] Anaerobic culture of B11 strain was performed at 30° C. for 48 hours using GAM Broth “Nissui” (Nissui Pharmaceutical, Japan)+agar as a culture medium. Stereomicroscopic colony observation and Gram staining were performed to observe colonies and cell morphology of specimens. The colony and Gram staining images are shown in FIG. 1 and FIG. 2, respectively. The cell morphology was Bacillus to oval Bacillus (1.0-1.5×3.0-5.0 μm), Gram staining was positive, and spore formation was observed. Colonies were cream in color.

[0018] (2) Physiological and Biochemical Properties

[0019] Anaerobic culture of B11 strain was performed at 30° C. for 48 hours using GAM Broth “Nissui” (Nissui Pharmaceutical, Japan)+agar as a culture medium. An anaerobic biochemical identification kit, API20A (bioMerieux, FRA) was used to perform tests. Test items and results are shown in Table 1.

TABLE 1
Test Items and results

| Test Items | Reaction/Enzyme | Results |
|---|---|---|
| IND | Indole Production* | − |
| URE | Urease* | − |
| GLU | Glucose** | + |
| MAN | D-Mannitol** | + |
| LAC | Lactose** | + |
| SAC | Saccharose** | + |
| MAL | Maltose** | + |
| SAL | Salicin** | + |
| XYL | D-Xylose** | + |
| ARA | L-Arabinose** | + |
| GEL | Gelatin hydrolysis* | − |
| ESC | Esculin hydrolysis* | + |
| GLY | Glycerin** | + |
| CEL | D-Cellobiose** | + |
| MNE | D-Mannose** | + |
| MLZ | D-Melezitose** | − |
| RAF | D-Raffinose** | − |
| SOR | D-Sorbitol** | + |
| RHA | L-Rhamnose** | − |
| TRE | D-Trehalose** | + |
| CAT | Catalase* | + |
| SPOR | Spore | + |
| GRAM | Gram staining | + |
| COCC | Coccus | − |

*Biochemical test, **Oxidation test
+: Positive, −: Negative

[0020] In addition, additional tests were conducted on the following items. The results are shown in Table 2 below.

TABLE 2
Additional Tests

| Test Items | Results |
|---|---|
| Starch hydrolysis | + |
| Growth in the presence of 5% NaQ | + |
| Growth in the presence of 6.5% NaQ | + |
| Growth in the presence of 7% NaQ | + |
| Milk coagulation test | Coagulation |

+: Positive, −: Negative

[0021] (3) 16S rDNA Partial Sequence Analysis

[0022] The attribution of the specimen was inferred from the results of the analysis of 16S rDNA (16S rRNA gene) partial sequence (approximately 1500 bp) (Sequence No. 6). Anaerobic culture of B11 strain was performed at 30° C. for 7 days using GAM Broth “Nissui” (Nissui Pharmaceutical, Japan)+agar as a culture medium. The 16S rDNA partial sequence analysis was performed using the following conditions.
[0023] DNA Extraction: Achromopeptidase (FUJIFILM Wako Pure Chemical, Japan)
[0024] PCR amplification: TKs Gflex DNA Polymerase (Takara Bio, Japan)
[0025] Cycle Sequencing: BigDye Terminator v3.1 Cycle Sequencing Kit (Applied Biosystems, USA)
[0026] Primer used

[0027] PCR amplification: 9F, 1510 R

[0028] Sequencing: 9F, 515F, 1099F, 536R, 926R, 1510R
[0029] Sequencing: ABI PRISM 3130 xl Genetic Analyzer System (Applied Biosystems)
[0030] Determination of base sequence: ChromasPro 2.1 (Technelysium, AUS)
[0031] BLAST homology search:

[0032] Analysis Software: ENKI (TechnoSuruga Laboratory, Japan)

[0033] Database:
[0034] DB-BA14.1 (TechnoSuruga Laboratory)
[0035] International Nucleotide Sequence Database (DDBJ/ENA (EMBL)/GenBank)
[0036] Search date: Feb. 22, 2019
[0037] Simple molecular phylogenetic tree analysis:

[0038] Phylogenetic tree estimation: neighbor-joining method

[0039] Base substitution model: Kimura-2-parameter

[0040] Reliability evaluation of tree form: Bootstrap method (1,000 iterations)

[0041] The results are shown in Tables 3 and 4.

TABLE 3
BLAST search result of B11 strain on DB-BA: Homology to top 30 sequence

| Registered Name | Strain name | Accession No. | Homology | BSL |
|---|---|---|---|---|
| Clostridium beijerinckii | JCM1390 | AB643462 | 1433/1437 (99.7%) | |
| Clostridium diolis | DSM5431 | AJ458418 | 1432/1437 (99.7%) | |
| Clostridium chromiireducens | GCAF-1 | AY22834 | 1418/1437 (98.7%) | |
| Clostridium saccharoperbutylacetonicum | N1-4 | U16122 | 1403/1417 (99.0%) | |
| Clostridium puniceum | DSM2619 | X71857 | 1417/1438 (98.5%) | |
| Clostridium saccharobutylicum | NCP262 | U16147 | 1394/1417 (98.4%) | |
| Clostridium butyricum | JCM1391 | AB595129 | 1405/1440 (97.6%) | |
| Clostridium paraputrificum | JCM1293 | AB536771 | 1385/1440 (96.2%) | 1* |
| Clostridium chatatabidum | DSM5482 | X71850 | 1378/1437 (95.9%) | |
| Clostridium uliginosum | CK55 | AJ276992 | 1368/1421 (96.3%) | |
| Clostridium sardiniense | DSM2632 | AB161367 | 1381/1441 (95.8%) | |
| Clostridium vincentii | lac-1 | X97432 | 1374/1439 (95.5%) | |
| Clostridium saudiense | JCC | HG726039 | 1375/1441 (95.4%) | |
| Clostridium monoliforme | JCM9990 | AB540985 | 1375/1441 (95.4%) | 1* |
| Clostridium baratii | ATCC27638 | X68174 | 1375/1441 (95.4%) | 1* |
| Clostridium tertium | JCM6289 | AB618789 | 1374/1441 (95.4%) | 1* |
| Clostridium sartagoforme | DSM1292 | Y18175 | 1372/1441 (95.2%) | |
| Clostridium disporicum | DSM5521 | Y18176 | 1372/1443 (95.1%) | 1* |
| Clostridium colicanis | DSM13634 | AJ420008 | 1365/1437 (95.0%) | |
| Clostridium gasigenes | DSM12272 | AF092548 | 1365/1441 (94.7%) | |
| Eubacterium tarantellae | DSM3997 | FR733677 | 1362/1439 (94.6%) | 1* |
| Clostridium quinii | DSM6736 | X76745 | 1365/1441 (94.7%) | |
| Eubacterium budayi | JCM9989 | AB018183 | 1364/1441 (94.7%) | |
| Clostridium chauvoei | ATCC10092 | U51843 | 1361/1442 (94.4%) | 2 |
| Clostridium septicum | ATCC12464 | U59278 | 1360/1442 (94.3%) | 2 |
| Eubacterium multiforme | JCM6484 | AB018184 | 1359/1440 (94.4%) | |
| Clostridium algidicarnis | NCFB2931 | AF127023 | 1349/1438 (93.8%) | |
| Eubacterium nitritogenes | JCM6485 | AB018185 | 1354/1437 (94.2%) | 1* |
| Clostridium putrefaciens | DSM1291 | AF127024 | 1348/1438 (93.7%) | |
| Clostridium carnis | ATCC25777 | M59091 | 1339/1431 (93.6%) | 1* |

Note 1:
BSL (Biosafety Level) shows Level 1* (opportunistic pathogens) or higher; blank cell means Level 1.
Note 2:
Shading indicates sequence data used for simple molecular phylogenetic analysis.

TABLE 4
BLAST search result of B11 strain on International
Nucleotide Sequence Database: Homology to top 30 sequence

| Registered Name | Strain Name | Accession No. | Homology |
|---|---|---|---|
| Clostridium beijerinckii | — | LN908213 | 1435/1437 (99.9%) |
| Clostridium beijerinckii | AAU1 | KC433940 | 1435/1437 (99.9%) |
| Clostridium beijerinckii | JCM 8031 | AB678394 | 1435/1437 (99.9%) |
| Clostridium beijerinckii | JCM 7990 | AB678386 | 1435/1437 (99.9%) |
| Clostridium beijerinckii | JCM 6287 | AB640693 | 1435/1437 (99.9%) |
| Clostridium beijerinckii | JCM 7829 | LC071788 | 1435/1437 (99.9%) |
| uncultured Clostridium sp. | — | MF360200 | 1434/1437 (99.8%) |
| Clostridium beijerinckii | JCM 7837 | LC258130 | 1434/1437 (99.8%) |
| Clostridium beijerinckii | B17 | KC915012 | 1433/1435 (99.9%) |
| Clostridium beijerinckii | NRRL B-598 | CP011966 | 1434/1437 (99.8%) |
| Clostridium sp. | MF28 | CP014331 | 1434/1437 (99.8%) |
| Clostridium beijerinckii | BAS/B3/I/124 | CP016090 | 1434/1437 (99.8%) |
| Clostridium beijerinckii | B12-KKU | KT799795 | 1434/1437 (99.8%) |
| Clostridium beijerinckii | NCIMB 14988 | CP010086 | 1434/1437 (99.8%) |
| Clostridium beijerinckii | JCM 7847 | AB971810 | 1434/1437 (99.8%) |
| Clostridium sp. | G117 | JX091678 | 1434/1437 (99.8%) |
| Clostridium beijerinckii | JCM 8028 | AB678392 | 1434/1437 (99.8%) |
| Clostridium beijerinckii | JCM 8026 | AB647333 | 1434/1437 (99.8%) |
| Clostridium butyricum | JCM 7840 | AB647330 | 1434/1437 (99.8%) |
| subsp. convexa | | | |
| Clostridium beijerinckii | RZF1108 | GQ375085 | 1434/1437 (99.8%) |
| Clostridium beijerinckii | SA-1 | CP006777 | 1433/1437 (99.7%) |
| Clostridium beijerinckii | E102 | JX267117 | 1433/1437 (99.7%) |
| Clostridium beijerinckii | E080 | JX267098 | 1433/1437 (99.7%) |
| Clostridium beijerinckii | JCM 8025 | AB647332 | 1433/1437 (99.7%) |
| Clostridium beijerinckii | NCIMB 8052 | CP000721 | 1433/1437 (99.7%) |
| Clostridium diolis | S33-KKU | KT799798 | 1431/1434 (99.8%) |
| Clostridium beijerinckii | JCM 1390 | NR_113388 | 1433/1437 (99.7%) |
| Clostridium beijerinckii | CP23-KKU | KT799797 | 1430/1433 (99.8%) |
| Clostridium beijerinckii | E11-KKU | KT799794 | 1430/1433 (99.8%) |
| Clostridium beijerinckii | E092 | JX267108 | 1432/1437 (99.7%) |

[0042] A simple molecular phylogenetic tree based on the 16S partial rDNA sequence of B 11 strain is shown in FIG. 3. In the figure, the upper left line indicates a scale bar, and 0.01 on the scale bar means that the length of the scale bar indicates 1% base difference. The numbers on the branches indicate bootstrap values, which indicates the reliability of the tree, the T at the end of the strain name indicates the Type strain of the species, and BSL indicates the biosafety level (BSL1* (opportunistic pathogen) or higher is indicated). As can be seen in FIG. 3, B11 strain is estimated to be closely related to Clostridium beijerinckii and Clostridium diolis.

[0043] (4) Deposition of Strains

[0044] Based on the above results, SIID 27451-B11 strain was found to be a strain belonging to Clostridium. SIID 27451-B11 strain was domestically deposited to National Institute of Technology and Evaluation, Patent Microorganisms Depositary (NPMD) (#122, 2-5-8, KazusaKamatari, Kisarazu-shi, Chiba 292-0818, Japan), which is an International Depositary Authority (IDA) under the terms of the Budapest Treaty, under Accession Number NITE P-02951 on May 16, 2019 and have been transferred to the international deposit on Apr. 22, 2020 in the same institute under International Accession Numbers NITE BP-02951.

Type of microorganism: bacteria
Cell form: Bacillus
Characteristics: spore-forming positive (spore-forming)
Taxonomical position: Clostridium sp.
Culture condition: GAM Broth “Nissui”+agar
Culture temperature: 30° C.
Culture period: 48 hours
Culture method: anaerobic

[0045] (5) ANI (Average Nucleotide Identity) Analysis

[0046] Furthermore, to examine whether B11 strain is a new species, Average Nucleotide Identity (ANI) value is calculated for the top three species with the highest homology to B11 strain, namely Clostridium beijerinckii (homology 99.7%), Clostridium diolis (homology 99.7%), and Clostridium saccharoperbutylacetonicum (homology 99.0%) to determine whether the species are same or different. In ANI analysis a similarity (ANI: homology value) between a full-length genome sequence or draft genome sequence of a control strain (specimen) and a comparison strain is calculated on a computer to determine whether the species are same or different. The ANI value is calculated by using the publicly available program ANI Calculator (http://enve-omics.ce.gatech.edu/ani/index), and if the ANI value is 95% or greater, the species are determined to be the same, and if the ANI value is less than 95%, the species are determined to be different (new species).

[0047] The comparative species used in the ANI analysis are listed in Table 5 below.

TABLE 5
Species used in ANI analysis

| | | | GenBank |
|---|---|---|---|
| SIID | Species Name | Strain Name* | Accession No. |
| 27451-02 | Clostridium beijerinckii | DSM 791^{T} | GCA_002006445 |
| 27451-03 | Clostridium diolis | DSM 15410^{T} | GCA_008705175 |
| 27451-04 | Clostridium | N1-4^{T} | GCA_000340885 |
| | saccharoperbutylacetonicum | | |

*^{T} at the end of strain name: Type strain

[0048] The results of the ANI analysis are shown in Table 6 below.

TABLE 6
ANI values (%) between specimens

| | SIID27451-B11 |
|---|---|
| Clostridium beijerinckii | 95.81 |
| (SIID27451-02) | |
| Clostridium diolis | 95.76 |
| (SIID27451-03) | |
| Clostridium | 82.59 |
| saccharoperbutylacetonicum | |
| (SIID27451-04) | |
| | Clostridium beijerinckii |
| | (SIID27451-02) |
| Clostridium diolis | 98.47 |
| (SIID27451-03) | |

[0049] Since the ANI value for SIID27451-B11 strain to Clostridium saccharoperbutylacetonicum is less than 95%, SIID27451-B11 strain and Clostridium saccharoperbutylacetonicum are determined to be different species. SIID27451-B11 strain provides the ANI value of 95% or greater to Clostridium beijerinckii and Clostridium diolis, respectively. The combination of Clostridium beijerinckii and Clostridium diolis also provides the ANI value of 95% or greater. Therefore, the above three specimens are determined to be the same species. It should be noted that, according to a report of Kobayashi et al. at 2020 (Kobayashi H, et al. Int J Syst Evol Microbiol 2020, 70: 2463-2466), Clostridium diolis was shown to be the same species as Clostridium beijerinckii, and the scientific names have been integrated into Clostridium beijerinckii. Based on the above, SIID27451-B11 strain was identified as Clostridium beijerinckii.

[0050] (6) Genome Analysis

[0051] DNA of SIID27451-B11 strain was extracted and subjected to next-generation sequencing and its data analysis.

### <Extraction and Purification of DNA>

[0052] DNA of B11 strain was extracted and purified using Nucleobond AXG20 column (MACHEREY-NAGEL, DE), and a purity of the extracted DNA was measured using ultra micro-volume spectrophotometer NanoDrop One (Thermo Fisher Scientific, USA). The quality inspection acceptance criteria were as follows: purity: A260 (absorbance at 260 nm, the same hereinafter)/A280≥1.8 and A260/A230≥1.6, and 20 μg (concentration of 150 ng/μL) or more.

[0053] Next, fragmentation of the extracted DNA was confirmed by agarose electrophoresis. The setting conditions were 0.5% agarose, 30 V, and 1 hour. The electrophoresis results showed that, compared with the DNA molecular weight marker (k-Hind III digest), a band was observed around 23130 bp for the extracted DNA, and thus the extracted DNA was determined to be of good quality for use in next-generation sequencing because of its low fragmentation.

[0054] <Next Generation Sequencing>

[0055] Next-generation sequencing and its data analysis were commissioned to Hokkaido System Science Co., Ltd.

[0056] Extracted and purified DNA samples of SIID27451-B11 strain were subjected to next-generation sequencing using next-generation sequencer PacBio RS II to obtain genome sequence information.

[0057] The genome sequence information of Clostridium beijerinckii (C. beijerinckii) type strain (GCA_002006445.1) was obtained from NCBI (National Center for Biotechnology Information, U.S.A.) web site (https ://ftp.ncbi.nlm.nih.gov/genomes/all/GCA/002/006/445/GCA_002006445.1_ASM200644v1).

[0058] The genome sequences information of SIID27451-B11 and Clostridium beijerinckii type strains were auto-annotated with “DFAST”, an automated annotation program for prokaryotes provided by National Institute of Genetics.

[0059] Based on the annotation information of the analyzed SIID27451-B11 and Clostridium beijerinckii type strains, draft genome sequences are compared between these two strains utilizing COG (Clusters of Orthologous Groups of protein) functional classification information. COG is a genetic function classification database for microorganisms provided by NCBI.

[0060] Table 7 shows a summary of the genomic information of the Clostridium beijerinckii type strain used, and Table 8 shows a summary of the genomic information of SIID27451-B11 strain.

TABLE 7
Sample Name: Clostridium beijerinckii Strain DSM 791 (Type Strain)
Sample ID: GCA_002006445.1
Species Name: Clostridium beijerinckii
Data Acquired from: NCBI (※1)

| GCA_002006445.1 | | Seq Name | Type | Length | GC (%) |
|---|---|---|---|---|---|
| Number of Contigs | 264 | sequence001 | linear | 148,805 | 30.0 |
| Total Size (bp) | 5,781,472 | sequence002 | linear | 121,086 | 29.6 |
| GC (%) | 29.7 | sequence003 | linear | 118,978 | 29.4 |
| N50 Contig Size (bp) | 43,059 | sequence004 | linear | 113,134 | 30.0 |
| Max Contig Size (bp) | 148,805 | sequence005 | linear | 107,222 | 30.3 |

| | | |
|---|---|---|
| Min Contig Size (bp) | 512 | ※ Only Top 5 in Config Size are selected ※ |

[0061] The 264 contig sequences of the Clostridium beijerinckii type strain shown in Table 7 are referred as sequence Nos. 7 to 270, respectively.

TABLE 8
Sample Name: 27451-B11
Sample ID: Ig18351
Species Name: Clostridium beijerinckii

| 27451-811 (Ig18351) | | Seq Name | Type | Length | GG (%) |
|---|---|---|---|---|---|
| Number of Contigs | 5 | sequence1 | Circular | 6,239,980 | 29.9 |
| Total Size (bp) | 6,372,138 | sequence2 | linear | 45,420 | 29.7 |
| GC (%) | 29.9 | sequence3 | linear | 34,111 | 29.3 |
| N50 Contig Size (bp) | 6,239,980 | sequence4 | linear | 29,427 | 29.3 |
| Max Contig Size (bp) | 6,239,980 | sequence5 | linear | 23,200 | 29.9 |
| Min Contig Size (bp) | 23,200 | | Total | 6,372,138 | 29.9 |

[0062] Five contig sequences 1 to 5 of SIID27451-B11 strain shown in Table 8 are referred as Sequence Nos. 1, 2, 3, 4, and 5, respectively.

[0063] Table 9 shows the predicted number of genes (ORF/rRNA/t RNA) for each strain detected by the annotation processing using DFAST.

TABLE 9
Predicted number of genes for each strain

| Sample Name | Sample ID | ORF | rRNA | tRNA |
|---|---|---|---|---|
| Clostridium beijerinckii | GCA_002006445.1 | 5,132 | 15 | 86 |
| strain DSM 791 | | | | |
| (Type Strain) | | | | |
| 27451-B11 | Ig18351 | 5,722 | 46 | 94 |

[0064] Next, among all the ORF information detected by DFAST, we focused on the COG annotated ORF information, compared the information of the genes possessed by the type strain and B11 strain respectively, wherein the COG functional classifications of the genes have become apparent, and extracted the COG annotation information specifically detected only one of these two strains. Table 10 collectively shows the COG annotation information specifically detected for each of the Clostridium beijerinckii type strain and SIID27451-B11 strain.

TABLE 10
Comparison of annotation information of type strain and B11 strain

| | | [symbol] | | [symbol] | |
|---|---|---|---|---|---|
| [symbol] | [symbol] | [symbol] | [symbol] | | [symbol] |
| [symbol] | [symbol] | [symbol] | [symbol] | [symbol] | [symbol] |
| | | [symbol] | [symbol] | | [symbol] |
| [symbol] | [symbol] | | | [symbol] | [symbol] |
| [symbol] | [symbol] | | | | |
| [symbol] | [symbol] | [symbol] | [symbol] | [symbol] | [symbol] |
| | [symbol] | | [symbol] | | |
| | | [symbol] | [symbol] | | |
| | | [symbol] | [symbol] | | |
| [symbol] | [symbol] | | | [symbol] | [symbol] |
| | [symbol] | | | [symbol] | [symbol] |
| [symbol] | [symbol] | [symbol] | [symbol] | [symbol] | [symbol] |
| | [symbol] | [symbol] | [symbol] | [symbol] | [symbol] |
| | | | [symbol] | [symbol] | [symbol] |
| | | | | [symbol] | [symbol] |
| | | | | [symbol] | [symbol] |
| [symbol] | [symbol] | [symbol] | [symbol] | | |
| | [symbol] | [symbol] | [symbol] | | |
| | | | [symbol] | | |
| [symbol] | [symbol] | [symbol] | [symbol] | [symbol] | [symbol] |
| | [symbol] | [symbol] | [symbol] | [symbol] | [symbol] |
| | | | [symbol] | | |
| [symbol] | [symbol] | [symbol] | [symbol] | | |
| | [symbol] | [symbol] | [symbol] | | |
| [symbol] | [symbol] | | | [symbol] | [symbol] |
| | | | | | [symbol] |
| | | | | [symbol] | [symbol] |
| [symbol] | [symbol] | [symbol] | [symbol] | [symbol] | [symbol] |
| | [symbol] | | | [symbol] | [symbol] |
| | | | | | [symbol] |
| | | | | [symbol] | [symbol] |
| | | | | | [symbol] |
| | | | | [symbol] | [symbol] |
| | | | | [symbol] | [symbol] |
| [symbol] | [symbol] | [symbol] | [symbol] | [symbol] | [symbol] |
| | [symbol] | [symbol] | [symbol] | [symbol] | [symbol] |
| | | [symbol] | [symbol] | [symbol] | [symbol] |
| | | | | | [symbol] |
| | | | | [symbol] | [symbol] |
| [symbol] | [symbol] | | | [symbol] | [symbol] |
| | [symbol] | | | [symbol] | [symbol] |
| [symbol] | [symbol] | [symbol] | [symbol] | [symbol] | [symbol] |
| | [symbol] | | | [symbol] | [symbol] |
| [symbol] | [symbol] | [symbol] | [symbol] | [symbol] | [symbol] |
| | [symbol] | | [symbol] | [symbol] | [symbol] |
| | [symbol] | [symbol] | [symbol] | | [symbol] |
| [symbol] | [symbol] | [symbol] | [symbol] | [symbol] | [symbol] |
| | [symbol] | [symbol] | [symbol] | [symbol] | [symbol] |
| | | [symbol] | [symbol] | | [symbol] |
| | | | [symbol] | [symbol] | [symbol] |
| | | | | [symbol] | [symbol] |
| | | | | | [symbol] |
| | | | | [symbol] | [symbol] |
| | | | | [symbol] | [symbol] |
| | | | | | [symbol] |
| [symbol] | [symbol] | | | [symbol] | [symbol] |
| | [symbol] | | | [symbol] | [symbol] |
| | | | | [symbol] | [symbol] |
| | | | | | [symbol] |
| | | | | [symbol] | [symbol] |
| [symbol] | [symbol] | [symbol] | [symbol] | [symbol] | [symbol] |
| | [symbol] | [symbol] | [symbol] | [symbol] | [symbol] |
| | | | | [symbol] | [symbol] |
| | | | | [symbol] | [symbol] |
| | | | | | [symbol] |
| [symbol] | [symbol] | [symbol] | [symbol] | [symbol] | [symbol] |
| | [symbol] | [symbol] | [symbol] | [symbol] | [symbol] |
| | | | | [symbol] | [symbol] |
| | | | | [symbol] | [symbol] |
| | | | | [symbol] | [symbol] |
| | | | | [symbol] | [symbol] |
| | | | | [symbol] | [symbol] |
| | | | | [symbol] | [symbol] |
| | | | | [symbol] | [symbol] |
| | | | | [symbol] | [symbol] |
| [symbol] | [symbol] | [symbol] | [symbol] | [symbol] | [symbol] |
| | [symbol] | | [symbol] | | [symbol] |
| | | [symbol] | [symbol] | [symbol] | [symbol] |
| | | | | [symbol] | [symbol] |
| | | | | [symbol] | [symbol] |
| | | | | [symbol] | [symbol] |
| | | | | [symbol] | [symbol] |

[symbol]

indicates data missing or illegible when filed

[0065] From the above results, it can be seen that the Clostridium beijerinckii type strain and SIID27451-B11 strain have sequences with different annotations. This indicates that SIID27451-B11 strain is presumed to be a strain having different characteristics from the type strain of Clostridium beijerinckii species.

[0066] As mentioned above, as a result of considering the taxonomic characterization of B11 strain, B11 strain is identified as a Clostridium beijerinckii species, while genome analysis revealed that B11 strain has sequences with different annotation from that of the type strain. Therefore, to further confirm that B11 strain is a strain with different characteristics from the type strain of Clostridium beijerinckii, we compared B11 strain, a type strain of Clostridium butyricum, which is a representative butyric acid-producing bacterium, and the type strain of Clostridium beijerinckii for their ability to produce organic acids. Details are shown in Example 1 below.

### EXAMPLES

### Example 1: Test for Organic Acid-producing Ability

[0067] Each strain was anaerobically cultured at 37° C. for 72 hours using GAM Broth (Nissui Pharmaceutical, Japan) as a culture medium. The culture solution was filtered through a membrane filter with a pore size of 0.20 μm and used as a sample solution. The concentration of organic acids in the sample solution was determined by high-performance liquid chromatography. This test was conducted on February 13, 2020, at T TechnoSuruga Laboratory Co, Ltd. The measurement conditions were as follows:
[0068] System: Shimadzu Organic Acid Analysis System (Shimadzu, Japan)
[0069] Columns: Shim-pack SCR-102(H) 300 mm×8 mm ID, 2 columns in series
[0070] Guard columns: Shim-pack SCR-102(H) 50 mm×6 mm ID
[0071] Eluent: 5 mmol/L of p-toluene sulfonic acid
[0072] Reaction solution: 5 mmol/L of p-toluene sulfonic acid, 100 μmol/L of EDTA, and 20 mmol/L of Bis-Tris
[0073] Flow rate: 0.8 mL/min
[0074] Oven temperature: 45° C.
[0075] Detector: Conductivity Detector CDD-10A

[0076] The nine organic acids measured were succinic acid, lactic acid, formic acid, acetic acid, propionic acid, iso-butyric acid, n-butyric acid, iso-valeric acid, and n-valeric acid. The results are shown in Table 11 below.

TABLE 11
Test for organic acid-producing ability

(μg/mL)

| | succinic | acetic | formic | acetic | propionic | iso-butyric | n-butyric | iso-valeric | n-valeric |
|---|---|---|---|---|---|---|---|---|---|
| Sample name | acid | acid | acid | acid | acid | acid | acid | acid | acid |
| Control (medium only) | 163 | 131 | 30 | 164 | 63 | | | | |
| Clostridium butyricum | 158 | 1107 | 804 | 1147 | 62 | | 1030 | | |
| NBRC 13949T | | | | | | | | | |
| Clostridium beijerinckii | 161 | 1038 | 26 | 1189 | 63 | | 1530 | | |
| NBRC 109359T | | | | | | | | | |
| 27451-B11 | 161 | | 49 | 240 | 69 | | 2828 | | |

Blank cells in the table are below the lower limit of quantitation. The lower limit of quantification is 5μg/mL for succinic acid, lactic acid, acetic acid, and propionic acid, and 10 μg/mL for formic acid, iso-butyric acid, n-butyric acid, iso-valeric acid, and n-valeric acid. The values for propionic acid include foreign substances.

[0077] It can be seen that B11 strain produced 2.74 times more n-butyric acid than Clostridium butyricum, which is a well-known butyric acid bacterium. Furthermore, it can be seen that B11 produced almost exclusively butyric acid when the amounts of organic acids contained in the medium (Control) are subtracted. In contrast, Clostridium butyricum produced lactic acid, formic acid, and acetic acid in addition to butyric acid. This means that B11 strain may be a very efficient and selective butyric acid-producing bacterium. In particular, B11 produced very little formic acid. Formic acid may have a deleterious effect on humans. Since B11 produces very little the formic acid, it is expected to be used for biological applications.

[0078] In addition, it can be seen that B11 strain produced different types and amounts of organic acids compared with Clostridium beijerinckii NBRC 109359T, the type strain of Clostridium beijerinckii. B11 strain produced lactic acid below the limit of quantification, less acetic acid, and more butyric acid compared with the type strain, Clostridium beijerinckii NBRC 109359T. Therefore, it has been determined that B11 strain is a strain having different characteristics from the type strain of Clostridium beijerinckii species.

[0079] [References to Deposited Biological Material]

(1) Name of depositary: National Institute of Technology and Evaluation, Patent Microorganisms Depositary

### (2) Contact: #122, 2-5-8, KazusaKamatari, Kisarazu-shi, Chiba 292-0818, Japan, Telephone No. 0438-20-5580

[0080] (3) Accession number: NITE BP-02951
(4) Indication reference: SIID27451-B11
(5) Date of original deposit date: May 16, 2019

### [Sequence Listing]

### HM06P-1_ST25.txt

The application's sequence listing, which the Patent Office published only in electronic form, follows.

SEQUENCE LISTING (270 sequences)

SEQ ID NO: 1 - DNA, 6239980 bp, Clostridium beijerinckii SIID27451-B11 (residues 1-2,079,994 of 6,239,980)
atggatgccgatcttaaaaatttatgggataaaaccttagatattataaaaagtgagctaagtgaagttagttttaatacttggattaaaagctgcgaacctctgtctatttcttctaatactctaaagataagcgttccaaattcctttactcaagatattttagataaaagatataaagatttagttgcaaactccataaaagcagtatgttcaaaattatatacaattgaatttattataatgtctgaaatctatgaaaaagaagaaattaagaattcttcaaatcagaaaccaaaagctattgtagttaatgatgaaatgtcgtctacattaaatccaaaatatacttttaattcttttgtaataggtaatagtaatagatttgctcatgctgcatctttggcagttgcagaatcaccagcaaaagcatataacccgttattcatatatggtggagtcggccttggaaagactcacttaatgcatgctatcggtcattacatcttagatggtaatcctaatgctaaagttgtatatgtctcatctgaaaaatttaccaatgaattaataaacgctataaaagatgataagaatgaagaattcagaaataaatataggaatgttgatatcttacttatagatgatatacaatttatagccggaaaagagcgtactcaagaagaattctttcatacatttaatgcgttacatgatgcgaataaacaaattatattatcttcagatagaccgccaaaagaaattccaacattagaagataggcttagatctagatttgaatggggcttaatagcagatattcaagttcctgatttcgaaactagaatggctatactaaaaaagaaagctgacgttgaaaatctaaatgtagcaaatgaagttatgggatacattgctactaaaattaaatctaatataagggaacttgaaggcgcactaataagaataattgcttactcctcattaactaacagagaagttactgtagatttagctacagaagcattaaaagatataatatctaaaaagcaaggaaagcacgtgactattgacttaatacaagatgtagtttctagttactttaatttgcgtgttgaagatttaaaatctcaaagacgaactagaaatgttgcttacccaaggcaaatagcaatgtatttaagtagaaaactaacagatatgtctttacctaaaattggagaagaatttggaggaagagatcatactacagtaatacatgcttatgagaaaatatctgagaatctcaaaactgatgattcattacaaaatactgttaacgacattacaaagaaattgactcagaattaatccacagagctgtataataagtacataataacttgtggataatatttttttagttatattacacttatacttgtggataaccagtctgttttgttactgatttatccacaatatttttgaactaaattttgttgatattacagggattatactagttatcaacaaattaacagcccctactactattattactataaaaatatttatctaactactaattatcatctttaattcttgtgaataaaataaggaggattttcaatgatctttacatgtgaaaaacaaaaaatattagaaggtatatcaatagtgcaaaaagccataacaggtaaatcaacaatgcccatattggaaggtatttatataaatgcaaataattcaacaataactcttataggttcagatatggatgttagtattcaaacattagttgatgcaactattatggaagaaggaagtatagttattgatgctaaaatatttggagaaataataagaaaactacctaattcaactataagaatagaaactatggaaaatcaactaataaaaataacttgtgaaaaatccatatttgatgtagtgtatatgaacacaaatgaatttccagagttacctgaaattaatgagaatttaaaaatatcagtaaatcaaaatatattaaaaaatatgataaaggggacttcttttgctatagctcaagatgaaacaagacctattcttcaaggaatattattcgaagtgagaaataaaaacttaaacttagttgctctagatggatatagactagctataaaaagtgaatttttagatacggatattgacatagaagttgtaattccaggaaaaacattaaatgaagtatcaaagatactagaagatatagatgagattgtggatataacatttactaataaccatatattatttaatttaaaaagaactaaaataatatctagattattagaaggtaagttcataaattataaatcattattaccacaagaacacaaactatctgtaaatgttaatagacaagaactacaaaatgctatagaaagagcatctctaatggctaaggatggaaataccaatttaataaaattagatttacatcaagataacttagtaataacttctaattctcaattgggaaaggtaagagatgaaatttcgataaaattgcaaggagatgaaatagaaattgcatttaactcaaaatatctgctagatgttttaaagaacatggaggataatgaagttgttatgaaaatgacatctggtataagcccatgtgttattgaagaaaatagtaatgaaaatgcaaaatatttagttttgccggtaagactaatgagataggaggataaatattattttaatatttatataatgaaaatgaataaaataaaaattgataccgaaattataaaattagatgcttttttaaaatgggcatctattgctagctcaggttcagaagctaagatctatgtacaagatggaatgataaaggttaatggagaagtttgtactcaaagaggtaagaagttaagaagtggagatgtagtaaacttcgatggttcagattttgaaataatatagagatagttatttgattatttatgatataattattataggtgtatttttatgtatgttaaaaatataaatttgcttaattataggaattataaaaaattaagcgtagaattgactgaaaatgttaatgtgtttgtgggagataatgctcaaggaaaaacaaatattttagaatcagtatattattgtgcttttgcaaaatcacacagaacatcaaaagataaagaattaataaattgggaaaatagtacagcctacataagcttacttatagggaaaaatagattagataaaaagattgatataaatatactcagagatggtaagaaagctataaaagtaaataatataaaagtaaataagataggtgaactatttggaatttttaatgtagtaatgttttctccagaagatttaaaagttataaaagaagcaccaagtttaagaagaagactattagatatggaattatctcaggtaaatccaaattattacttcaatctagtacaatataataaagttctaggcgaaagaaacattttattaaagagcaggtcatttagtgaagatattttagatgtatatgatatacaattgagtaaatatgctgattatattatttcaaaaaggttagaatatataaataagataaatttttacggtgatataattcataaagaaattacatctggaaaagaagtaataaactttaaatataattgtactgttaatctagaaaatggaaaatttaaagataattatttaaaaaaactaaaagataatattgaaaaagatagggaaaaggggttaacgtctgtagggcctcatagagatgattttagcgtatttataaataatattgatactaaggttttcggatctcaaggacaacaaagaacatctattttaactatgaaatttgcatctttaaaaatcattagagagattacaggtgaatatccagtattattgttagatgatgttttatcggagcttgatgtaaataggaaaaaatatatattaaaatcaataaaggatatacaaactataataacatgtgctggaattgaggatttaaatgattatttagatgataaagtcaaaatatttaatgtatcaaacggacaaattttaaatcaagggaggaatatataatgtttttgcatttaggtgaaaatgtagtagttcccattaaagacattattggaatattcgatcttcaaaatacgatgtatagctctgatacaatacaatttttaaggctagcagaagaagacggatttgtagaaagaataacagaagaaaaaccaaagtcgtttataatagcggaagtagataataagagtaaaatatatttatcaccaatatcatcaactacattaacaaaaaggacagatatagaatatagttcttaattctataaaattaaaaattttaataatacttattaagtttaggaggagtctgatttggaacaaaataacaaaaaatatgatgaaaatcagatacaagttcttgaaggattagaagcagtaagaaaaagaccaggaatgtatattggaagcactagttcaagaggccttcatcatttagtatatgaaatcgtagataatagcattgatgaggctttagcaggatattgtaagaaaatagaagtatacattaatgaggataattcgattacagtaaatgacgatggtagggggatgcctgtaggaatacatcctaagatgggaaaatcaactgttgaagttataatgacaatattacacgcaggtggtaaatttggaggaggaggatataaggtttcaggtggattacacggagttggtgcatctgtagttaatgctctttcggaagaatgtactgtcacagttaagagagatggacatatatggcaacagaaatatagtaagggaaaggttctaaacgaacttacaaaagtaggggacagtgatcagactggaacacagacatattttaagcctgatgcagaaatatttgatgaaatagtgtttgattttgaagttttatctcaaagattaagagaactagcattcttaaataaaggaatatatataaggctagtagataaaagagatgaaaaagaagaagttttccattacgagggtggaattaaatcatttgttagctacttaaataggaataaagtcccacttcatgaagaacctatatatattgaaggggtgaaagataacatatcggtggaagtagcgcttcaatataatgacggttatactgaaaatatattttcttttgcaaacaatattgatacagttgaaggcggaacgcatctagttggatttaaaactgcactaactagagtatttaacgattatgcaaaaaaatttgggcatataaaagagaatgacaagaattttactggtgatgatataagagaagggctgactggagtaatatctataaaaattgaagaaccgcaatttgaggggcaaacaaaaactaagctaggaaatagcgaagtaagaggaattgtagactcaattgttggtgaaaatataggtatattccttgaggaaaatcctaacataggtaaaatgattgttgataaggctctaatggctgctagagctagagatgcggctagaaaagcgagagaattgacaagaaaatcagtcttagaaagatctacattgcctggaaagttagcagattgttcatctaaagatccaagagagtgtgaaatttatatagtcgaaggggattcggcagggggatctgcaaagcagggaagaaatagaaaattccaagctattttacctttaagaggtaaaatattaaatgttgaaaaacaaagattagatagaatattaaatgcagatactattaggtcgatgattactgcatttggagcaggcataggaaatgattttgatgttgagaagattagatataatagaattataattatgacagatgccgatgttgatggcgctcatattagaacattattactaacatttttttatagatatatgaggaatttaatagatgatgggcatgtatacatagcgcaaccaccattatataaagttagtaaaggtaaaaaagattattatgcatatagtgatcctgaattagaaaatgttttatctgagctaggtggaaaagataattcaactgatattcaaagatataaaggtcttggagaaatgaatgcatctcaattgtgggatacaactatggatccagaaaagagaattttattaaaagtaaatatagaagacgctatggctgctgatgaaattttcaccatattgatgggggaaaaagttgagccaagaaaagaatttatacaacaaaatgctagaaatgttgttaatttagatatttagtactgaaatacgaggtgaagtacatggattttaatgaaggaaaagttataccagtagatattaaacacgaaatgaagaaatgttatatagattatgcaatgagtgttatagttggtcgtgcattgccagatgtaagagacggactaaaacctgttcatagaaggatattatattcgttgcaggaattagggttaactcctgaaaagggatatagaaagtgtgcaagaatagttggagatgttttaggtaaatatcatccacatggtgatagttcagtttatgatgcattagttagaatggctcaagatttttcaatgagatatatgctagttgatggacatggaaattttggatcagttgatggtgacagtgcagctgctatgagatatacagaagcaaaaatgaataaaatagcagttgaaatgttaagagatattaataagaacacagttgattttatgcctaactttgatggtgaagagcaagagccagtagtattaccatcaagatttcctaatctcttggtaaatggttcatcaggaattgcagtcggcatggcaactaatattccgccacacaatttggctgaaataattgatgggactattatgcttatagataatcctgaaagcacagttttggaacttatgactaaaattacaggaccggattttcctacaggggctaccattatggggaaagcaggaattagggctgcatatgaaactggtaagggaaagataatagtaagagcgaatgctgagatagaggaagaaaatggaagacactcaataatcgttactgagataccatatcaagtaaataaggcaaaacttgtagaaaatattgctgatttagtaaaagataaaaagattactggaatctctgatttgagagacgaatcagacagagacggtatgagaatcgtaattgagcttaaaagagatgctaatccaagtgtagtattgaatttattatataagcatacaaaacttcaagatacatttggcattattatgttagcattagttaataatgagccaaaggttttaaatttaaagcaaatactagaaaattatgtagaatttcaaaaagaagttataacaagaagaactatatttgatttaaacaaggcagaggctagagcacatatcttagaaggtttaaaaatagcattagataacatagatgaagtaataagtataataagaaattctaatactactgaaattgccaaaaatactctaatggaaagatttgaactttctgagaagcaatctcaggctatattagagatgagattaagaagattaactggattagaaagaggtaaaatcgaggaagagtataatgagctaatgaaacaaatagaatatttaaaatctattttagctagtgaagaaaagctgttagatgttattaaagaggaactattagaaataaagaataggtactcagacgagagaaaaagtaaaattgaaaaaatagtaaatgaaattgatatagaggatttaattcaagaagaagatgttgtgataacattaacacattcaggatatataaaaagaatttcggcagacacttattcatcacaaagaagaggtggaaaaggaattcaagcaatgtcaactaaggaagatgattttgttgagcacttgatgataacatcaacacattctgatgtactattctttaccaataaaggaagagtgtataagttaagagcttatgaagttcatgatgctggaagacaggcgaaaggaacaaatctgataaatcttatagcaatagaacctgatgaaaagattcaaacagtacttactgtaacagatgagaaaaaagaaggctttttgtttatgggaactaagcaaggaatagtaaagaagactccattaagtgaatttaaaaatctaagaaagaatggattaattgcaataagcttaaaagatggcgatgaattattaaaagtaaagaatacttatggtgatgctaatattatggttgtaactcaaaatggttatgccgttaaatttaatgaaaaagatgttagatcaatgggaagaactgcatcaggtgttaaagctattaatttaaaagaagatgatatagcagtatgtatggatattgctgttgatggagaagagttattagtaataagtgaaaatggatatggaaaaagaactcctattgctgaatataagcttcaaaataggggcggagtagggctaataacttataaaattagtgaaaagactggaaagcttgctggcgctacaatttgtaaggtagatgatgaattaatgcttataaattctagtggagtagctattagaattaatgtagcagatatctctgtaacaagtagatcagcaatgggggtaacattgatgagaacgaatgaagatgagaaagttgttgcaatagctaaaatattaagcagtgatgatcaagaaactgaatctagtgatgaagctgaatctgaaataaataatatagaataataatattaaatataataaatcttataagattataaataaggcataactattgaatataggttatagccttattttttataggtattgtatattaaagtcttataaaagtatctacatatatgccaggcgtatcataataagatatattaagtatcatatagatatgttaattaatgtgaacataaattaatataattaggttatattgtataagtactgttgaattattatgttaatataaaaaacgtcgctgaagcacataaacactttaattaaatttaggaaaaatatttttgatataatataaaaatattttaaaaagttgttgacagtgtgtaaaacaggtgatatactaagaaagtcgcttgagggtgacgaaaattaataactacaatgagaattgtaggaaagaaaattggtctttgaaaattgaacagaataacataaatacatttaagtaaaccagcaatttttatttgagtaagctaagattaaactttttattgagagtttgatcctggctcaggacgaacgctggcggcgtgcttaacacatgcaagtcgagcgatgaagttccttcgggaatggattagcggcggacgggtgagtaacacgtgggtaacctgcctcatagaggggaatagcctttcgaaaggaagattaataccgcataagattgtagtttcgcatgaaacagcaattaaaggagtaatccgctatgagatggacccgcgtcgcattagctagttggtgaggtaacggctcaccaaggcgacgatgcgtagccgacctgagagggtgatcggccacattgggactgagacacggcccagactcctacgggaggcagcagtggggaatattgcacaatgggggaaaccctgatgcagcaacgccgcgtgagtgatgacggtcttcggattgtaaagctctgtcttcagggacgataatgacggtacctgaggaggaagccacggctaactacgtgccagcagccgcggtaatacgtaggtggcaagcgttgtccggatttactgggcgtaaagggagcgtaggtggatatttaagtgggatgtgaaatactcgggcttaacctgggtgctgcattccaaactggatatctagagtgcaggagaggaaagtagaattcctagtgtagcggtgaaatgcgtagagattaggaagaataccagtggcgaaggcgactttctggactgtaactgacactgaggctcgaaagcgtggggagcaaacaggattagataccctggtagtccacgccgtaaacgatgaatactaggtgtaggggttgtcatgacctctgtgccgccgctaacgcattaagtattccgcctggggagtacggtcgcaagattaaaactcaaaggaattgacgggggcccgcacaagcagcggagcatgtggtttaattcgaagcaacgcgaagaaccttacctagacttgacatctcctgaattacccttaatcggggaagcccttcggggcaggaagacaggtggtgcatggttgtcgtcagctcgtgtcgtgagatgttgggttaagtcccgcaacgagcgcaacccttattgttagttgctaccatttagttgagcactctagcgagactgcccgggttaaccgggaggaaggtggggatgacgtcaaatcatcatgccccttatgtctagggctacacacgtgctacaatggctggtacagagagatgctaaaccgtgaggtggagccaaactttaaaaccagtctcagttcggattgtaggctgaaactcgcctacatgaagctggagttgctagtaatcgcgaatcagaatgtcgcggtgaatacgttcccgggccttgtacacaccgcccgtcacaccatgagagttggcaatacccaaagttcgtgagctaacgcgtaagcgaggcagcgacctaaggtagggtcagcgattggggtgaagtcgtaacaaggtagccgtaggagaacctgcggctggatcacctcctttctatggagaaatctagaccaacatgatgtttggctagtacagatacattattatgtatcaaaatataaaatacttgctcaaaggttacttaagtatttgttctgttcaattttgaaagactaagtctttcaatgttctttgaaaattgcacatagatttaatgtatataaaatacaacaaagccaagaataaatattctttgtgatatgactaataattaggtcaagctacaaagggcgcatggtgaatgccttggcatcaggagccgatgaaggacgcgataagctgcgataagcttcgggtaggcgcacatagccagagatccgaagatttccgaatgaggaaactcacatgggaaaccccatgtatcataaagtgaatacatagctttatgaaggtatacccagggaactgaaacatctaagtacctggaggaagagaaagaaaaatcgattttcttagtagcggcgagcgaaaaggaaagagcccaaaccagagatttatctctggggttgcggacagaacataacgagaaatcatagttaattgaacacaactggaaagttggaccacagtgggtaatagtcccgtaagtgaaaactatgataatcagttctgcaccagagtaccacgagacacgtgaaaccttgtgggaagcagggaggaccacctcccaaggctaaatactacctgatgaccgatagtgaagcagtaccgtgagggaaaggtgaaaagaaccccgggaggggagtgaaatagaacctgaaaccatgtgcctacaaccgatcagagcaccttatgtgtgtgatgatgtgctttttgtagaacgagccaacgagttacggtatgtagcgaggttaagtacttaaggtacggagccgaagggaaaccgagtcttaatagggcgactagttgcatgctgtagacccgaaaccgggtgacctatccatggccaggttgaagcgagggtaaaacctcgtggaggaccgaaccacgttgctgttgaaaaagcatgggatgagctgtggatagcggagaaattccaatcgaactcggatatagctggttctcctcgaaatagctttagggctagcgtcggaaaatgtgagtagtggaggtagagcactgaataggctagggggcatagcgcttaccgaaccttatcaaactccgaatgccacatactatcagtccggcagtcagactatgaaagataagttccatggtcaaaagggaaacagcccagatcgtcagctaaggtcccaaagtgtaagttaagtggaaaaggatgtgggatttctaagacaactaggatgttggcttagaagcagccactcattaaaagagtgcgtaatagctcactagtcaagagatcctgcgccgaaaatgtccggggctcaaacttaccaccgaagctacgggttcacgtgtataacgtgagcggtagaggagcgtcgtaatcgggctgaagtcgtaccgtaaggagcggtggactgattacgagtgagaatgttggcattagtagcgagatgtaggcgagaatcctacaggccgaatatctaaggtttcctgagtaaagtttgtcttctcagggttagtcgggacctaaggcgaggccgaaaggcgtagtcgatggacaattggttgatattccaataccactataatcgttattatcgatggtgtgacggagaaggataggatgtgctagctattggatgctagtctaagcgtttagggagttgggattggcaaatccgttccaacaattctgaggcgtgatggggaaggttctacggaaccgaagtatctgattccatgcttccaagaaaagcatctagagagagaagtagtgcccgtaccgcaaaccgacacaggtagatgaggagagaatcctaaggccgacggaagaattgcagttaaggaactaggcaaattgaccccgtaacttcgggagaaggggtgcctgagaaatcaggccgcagagaataggcacaagcaactgtttaacaaaaacacaggtctctgctaaagcgaaagctgatgtataggggctgacgcctgcccggtgctggaaggttaaggggaacacttagcgaaatatcgcgaaggtgtgaacttaagccccagtaaacggcggccgtaactataacggtcctaaggtagcgaaattccttgtcaggtaagttctgacccgcacgaatggcgtaatgacttgtgcactgtctcaactgcaaatccggcgaagttgtagtgcgagtgaagatgctcgctacccgcgattggacggaaagaccccgtagagctttactgtagcttagcattgaatttcggtattgtctgtacaggataggtgggagactgggaaactagggcgtcagccttggtggagtcgttgttgggataccaccctgatagtattgaagttctaactggatgccatgaaactggtgacaggacattgttaggtgggcagtttgactggggcggtcgcctcctaaaatgtaacggaggcgcccaaaggttccctcagaacggtcggaaatcgttcgaagagtgtaaaggcagaagggagcctgactgcgacacctacaagtggagcagggacgaaagtcgggcttagtgatccggtggtacctcgtgggagggccatcgctcaacggataaaagctacctcggggataacaggctgatctcccccaagagttcacatcgacggggaggtttggcacctcgatgtcggctcgtcgcatcctggggctgaagtaggtcccaagggttgggctgttcgcccattaaagcggcacgcgagctgggttcagaacgtcgtgagacagttcggtccctatccgtcgcgggcgtaggaaatttgagaggagctgtccttagtacgagaggaccgggatggactgacctatggtgtaccagttgtttcgccagaagcatagctgggtagctaagtcgggaagggataaacgctgaaagcatctaagtgtgaagcccacctcaagatgagatttcccatagcataagctagtaagaccccttgaagactacaaggttgataggtcagaggtgtaagtatggtaacatatttagctgactgatactaataggtcgagggcttgaccaatataatcaagttgtaaatacattaaagaaactgtgtgcaattttcaaagaataatataaaaaatacttgacataagatgtgttgcaaagtataatattatttgtaatgatctggtgatgatggcatagaggtaacactccttcccattccgaacaggaaagttaaggtctattacgctgatggtactgcatgggagactgtgtgggagagtaggaagtcgccaggtaaaatttaaaagggatctttagctcagttggttagagcaaccggctcataaccggtaggtctagggttcgagtccctgaaggtccaccatgggggtatagctcagttgggagagcacctgccttgcacgcagggggtcaagagttcgaatctctttatctccaccactaagaagttatgaattaattcataacttcttttattatacaattatttaattatgtttagtatgaataagcataggagataggaatgtttttatatagaataaaacaattttattgggcaatagaatctatattcattaaggaaaatatggaaatactaaagatgtatcttagtatttctgagttggatttatttatgaaacttactaaatcagagcggcaacattcaataagagtttgtagaacggctataaaatatatagaggataataatatagttaatatcgataaaaaaaagatgtctaagtgtgcattattgcatgacataggaaaattagaatctaaattaaatatattttataaaggcattattgtttttttaaatagtattactcacgaaaaatttttgaagtataataaaaataagaaaataataagttattataatcatccggaaattggagcaagactgattgagagtattaataatgatgaatgcttagaagtaataaattctattaagtatcatcataataaaagtaatattgactcaaaaaatatatatttaaaagtattaagtatatctgatgattgcaattaaaataggagggaaatatgaattctattgagagaagagaggatataattagattacttctagaaagtaatgagcctttgaaaggcagctttatagcaaaaagatattctgtaactagacaggttatagtaaaagatatagcaattcttagagctaaaggtaagaatataatagcaactccagatggatatataattaatgcaaataataataaagctaaagcaattattgcagtaattcatactgaagatgagatgattgaggaattaagtatagtaatcaaatatggtggaattattgaagatgtagtagtggagcatccattgtatggagaaataaagggaatgcttatgattaagaattataatgagttaaataaatttattgaaaaatataaggaacaaaaagcaaaattactatctgcattaactaatggagttcatcttcatacaatagcagctgaaactcaagatgatattgatttaattatattggaattgaaaaagaacaactttatagtttcagatttggaggactagtaatggattatgatgtgctaattttaggcggtgggataattggatgcgcagttgcctatgaactttcaaaatataatataaatatagctttaattgaaaagggatatgatgttgcaaacgatatttcatttgcaaatacagctgttgtttatgatggttcagaatcaagtagtagtaaaatggctctcttggagaagagaggtatagatataataaggaagcattgtaaaaagttcaatgttagatataataagattggctcattaaggattttcttagatgagagtaatgaactattaaataaagtgtatagtgattctgtggatcacggaatagatggagttcgtataatagatagtgatgaactttataatgtggaaccaagtttaaatttagaggcaaataaagctatctattctgagaatacttcaataatatcaccatataacctagctgtttcatatgcagaaatagctgtagataatggagtgaattttagattagaagaagaggttatagatattaagactatctctaagggattcagagtaactacgaataaaaataagtttacttgtaaactagttattaatacaattccaaatgaatcatttaatgacatgtgtagtaatgtaacaagcgaaatgaaaaataaaaaagttaggtgtataatagttaagaaaagcataggtgataacttaaagaaaattattattgaagatatagatgaagaaaattcgatgataaaggcgccaatatcggaaaatgaaaatttaattggaattaagattagtgataattttagctctaaattagaattgccagaaaaaatattgaaaaatataaaaaaagagtcaataattaatatatttacagaagtatatagcgaaaatgatatgttaatagatgatagtaatttagaggccggttatataaaggttgtaggaaatcactatgctaaaatatcagttgcaccagcaattgctcaggatattgaaaagaaagttaaagtaagtatgaatataacgaagaagaaggattatattgataaaaagagagagacatatatatttagagagatgactaaagatcaaataaatagaataatttctcttgataagcgttatggcaatattatttgtaattgcaataatatttctgagggagaaattattgattcaataagaagacctttaggtgcaagaacagtagagggagtaaaaaggcgtacagggataggtcttggaaactgcaatggttcaaattgcaatataaaaataataaagatattggccagagagatggataaaagtgctttagatatagtagatgattctatggattcacaaattttagttggaagaattaaggaatttaatgaaatttagattggagtaattagtaatgcctaataaagatgtttttaccagtttagttagagtaaaaggtaatatgaattacaaagttgtatcagtaaaaagtaataaaagcgttgagaagcacttatggaaagaattctcaaaggttcttagcaggatttatgttagtactcctacaaatattggcgataatatttgtaagaatatacttaatactggcgtagatataatatgtacaaggaagataaaataatagctaaacactaaatccataaggttatattttattataataatttattttaataaaatattataaaatagttgacataagtataagcaattgatataataatacatgtcactagacgtggaaagatggtcgagttggtttaaggcaccggtcttgaaaaccggcgtgcgtgtaagcgtacctagggttcgaatccctatctttccgccatttttttgtctaaaaatataaagtttatttggaggattactcaagtggctgaagaggcgcccctgctaagggcgtaggtcgggtaactggcgcccgggttcaaatcccggatcctccgccaagcatctaacatttgttaggtgctttttagtataattaattagtcttagtaaaacatatatttttatttgttgaaaatttatatataaattctcaataaatatatttactattctaaattatttgatattctgtaactcatatctacaattaagtttagataaatgaaaaaattaaatttattgcaataaatatgttgacataaataaaattagttgatataatcatatttgttgtgagacatggaaagatggtcgagttggtttaaggcaccggtcttgaaaaccggcgtgcgtgtaagcgtacctagggttcgaatccctatctttccgccattaaaatagaaggcacatggaggattactcaagtggctgaagaggcgcccctgctaagggcgtaggtcgggtaactggcgcccgggttcaaatcccggatcctccgccaaacatctaacaaattgttagatgttttttttgtttttaattaattttatagagtaaataaaattaaaatattataattaatatgtctgcttataaaataaattaattatcataagaaggtgaattatgctaagcggcagcaaagtgcatttaagagtactaaaaagggaagatgtaagtatattattcaagttacatagtgaagagaaagttaaaaagtataatataataattgagagcatggataataaagtagatttaagaaaatctttaagtatagtgaatgaagatgataatctaattggttttgtaacgtacaaggagcagggatattatagtaggatatactgtattggaataacgatagggagtgagtattggggaagaagttatggagtagattctataaaaactcttctaagatatttatttaaaaagctgaatgctatgaaagtagaattatacgttgctagttataatatacgagctataaggtgttataaaaaatgtgggttcatagaggaaaatattaaaagatattatagccatatagataaagaatatatagatatgataattatggggataattagagaaagatataattcatatttaaaatgtgaggatggaaaatacatatgagtataagatttgtttatggaaggtctggtacaggtaagagtaaattttgtattgatgagataaaaaataatattaacaaaaaattagatataaataaattaattctattagttccagagcagtatacatttatgactgaaaataaaatattgcatgaaattggagaacatgctttcttaagaacagaagtgatgagttttaagaaaatggctcataatatttttgaagaatatggtggaagagttaaagagattattaaggaatctggaaggaatatgctaattcatagagttataaatgaaaatattgagtctttggattattttaataggatgtctagagaacaaggatttaatgaaattatatcagaagtgatttcggaatttaaaaagtataatattagcattgatagtataagagcaatagatgagaaaataaatgataatgaattatatcaaaaaattaaagagttgatgataatttatgaagcatttaacttaaaaatgcatgaaaattacattgatggagatgatcagttaacattactaaataaaaagttattagaaagtagcgcgtatgtagattctgaggtgtggatagatgaatttactagctttacacctcaacaactggacattataaaggtgttggccaagagatgtagaagagttaatataactttttgtattgataacgaatctctaaataacaattctgaagatataactgatgtattcaatatcataaagaatactgaaaataaaatattaaaaataatgaaagaaaacaatatagcttatgataaaccagtcaacttaaataatgcaattccttataggtttaaagataatctagaacttgatcacatagagaaatattttttttcttacccatttaatgaatatgataagaaccctgagagaataacattttacaaagcaagtaatatttatgacgagatagaaagagtatcaaaaagtattacaagtttggtgagagaaaatgggtatagatatagagatatatctgtagtttgtagaaatatagatgattatgaaaaaataatatcagtaatatttaaagattataatattccatactttttagataaaaagattcaattactaagtaatccattgattgtacttataagttctgcttttgaaattttgcttaagaattggtcttatgaaagtgtatttaaatatttaaagagtggtttaactggcatagataattcatatatagataggctagagaactttatattagagtatggggtaaagggttataaatggacatcaagagaaatagtaaatgagaaatggtttataggaaatagtgaattgacggatgataaagttttaatagctgaaattatggaagagataagatatccattgatgacttttcataataaaataaatggaaaacataaagttaaagatatatgttcagctatttatgagtttttagtggatgtaaaagtttttgacagaattaatgaatggattaaaaattttgaagaattaggattagaagataaagttaaggaatatagtcaggttgaaagtatagttatagacattctagatcaagcggttgatgttataggcgaagagagattagagtattctgagtttttcagaatattgagttctggttttgccaatgaagagataggaattatacctgtagcattagatcaggttaatattggagatatagcaagaataaagggcagagatgtgaaagttctttacatagtagggattaatgatggagttctaccagcatccaagaaagaggaaggtttattatctgatagagatagaacaacattaggtgaggttggaataaatttatcatcaacaactagaaataaagtttttgaagaacagtatctactatatatagcattaacaattagtagtgaatatttaatgctttcatatccaatggctgattttgaaggtaagtcattaagaccatctatagtaatatctagaatgaaaaaaatatttcctaatttaattgaagaaagtgcaatttatgattcaaaaatccttgaaaataaacttagcaaaattattgcaccaattccaacatttaatgaacttataatttctatgagaaaagattttgataaagaagatatagagccttactggtctgaggcatatgaatggtttaaaaataatggtgagtttaaggataaagttaaaaatatatttaaggggcttagttactcgaatattggagataaagttccaagaaacaaacttagaaaactttatcagaatgacttagaaaagttagtatttagtgtttcaaagttagaaaagtatgcagaatgccccttttcttattttgttcaatatgggctaaaggctaaaaatagaaaggtatatgaatttacaccaccagacttaggatcatttgtacacgaaatgcttgattcattcactaataaagttagagaagatggaatgctatggtctgatttaagcaatgaaaaatgtaaggagataatatctaaccttattgataagaagttaatggatgagagtaattctatattaaatagtactaagaaatttaaatatttagcgcaaagatttaaaagagtaatatctaaatctgtttcagttattgcaagtcaaataggaaaaggtgaatttgaagtatttaagactgaatttgattttggaagttatagctctggagaagctataacattagatttgaatgataatgaaaaggtgtatcttcaaggaagaattgatagaatagataaattagatttagatggcgaaacttatataagaattatagattataaaactggagctaaaaagtttgatttaaatgaaatatattatggattacaaatgcaattattagtttatttagatgcacttataaagaattcgaaatatatacttgataaacaagtaaagccaggagcaatattatactttaaaatagatgatcctataataaaaagcaaaaaagaaatgactgatgaagaagtagaaaaagaagtattaagtgctttaaagatgaaaggattagttttaaaagatgcgagggttgtaaaagctatggataaggatatagaaggatattcattggttataccagcatcatttaaggctgatggaagctttaaggcaaccagtgacgttgtaacagaagaggagtttagaatacttagagaatatgtaaataggaagatgatagagatatgtgaagaaatgctaagtggagatattaaaattcagccgactaagaattctaacattgctcattgtgaatactgtgatttttcatcaatatgccaatttgatacagagataaaagataataaatacaaaattataataaacaaatctgcaaatgatatatggaataatataaaaaaagaaattgataattctaataaattaattaaagttgaaaatgaggaagtatagtaatataaaagaatctagtatatttttgattaaaattaattaggttttcttacagttaaaacgattttaattagtacaggagagatttatatatgggtaatacaaaatggactgatgaacagttaagtgcaattgaaacgagaaattgtaatttactagttgcagcggcagcgggttcaggtaaaactgctgttttagtagagaggattataagaataattactaatgaagagaatccggttgatatagataagttattggttgtaacttttactaatgcagcagcagctgagatgagggaaaggatcgcagatgcgatatcaaaggaattagagaataatcctaggtctaaaaatctacagaggcaattaacgctgttaaatagagctaatatcactacaatgcattcgttttgcttagatgtaattaaaaataattaccataggattgatctagatccatcatttagaataggtgatcagactgaaggaatactaattaaatcggaagttattgaagaacttttcgaagataaatatgaggaagaagatattgagttcactaatttggttgagatatttagcagctataaaaatgataataatttaaaaaacttagtattagatttatataactttacaatgtcaggtccatggcctgaaaaatggcttattaatagcacagaagcctttaatattaaaaaattagatgaattggatagaactaattgggtaagagttttagctcaaagtgtaaaaattgagttagatgggtatgttaagatgttagaaaaggccattgaggttactagcaaaactgatggattagaaccttatatggataacttattaatggaattaagttatatacaaaatgcttatgaatctactgataatggacttgaggaaatgtttaattcattatcatcaatacaattcagtagattaaaatctataaaaaaggataaggtttcagatgagcaatcccaaaatactgtaaaaaaaattagagatgatgttaaaaaaggaatatctgaattattaaataatgcatattcagtaaatccacagcaaatgttaaggaatattcaaggggcatatccttacataaaaaaattgatagaattagttttagaatttagtgctaggtttagtaagcgaaaaagggaaagaaatatattagatttcaatgatttagaacatttatgtttaaaaatattaagtgattatgatgatgagaataatataattccatcaagcattgcaatgaattttaaagaatatttcgatgaggtacttgttgatgagtatcaagattcaaataacgttcaagaaacaataataaacctagtatccagaaaaaacgatgataatcccaatgtatttatggttggtgatgtgaagcaaagtatatataggtttagacaagcaaaacctgaattatttattgaaaaatataatacatatgattcaagtaatgggatgaacagaaaaattcaattatataaaaactttagaagccgaagagaaattatagatggagtaaattacatctttaaagaagtaatgtctgaagttgttggggagttagaatatacagatgaggaagctttaaatttaggtgcagactttaaggaaaatgaattaaaagatacaattattggaggccctattgaagttaatataattgataaaagctataatgaaacggttgtagaagataatgaggaacaggaagaaataaataatgttattttagaaggtagaatcgttgcgaagagaattaaagaactaatgtcaaaaaatgaaaatgaacaaatctttaaagttttagataaggaatctggtgaatataggccattaaaatatagggatatagttattctacttagagctactaaaaattggtcagagtcattattagatgagttaagtgcagaaggaattccagtgtatgcagatacaggatctggttattttgaatcaattgagattagaacaataatttctcttttaaaggttattgataatccaatgcaggacattccagtaatatcagtaatgagatcaccaattatgggattttcggcagaagaaataagtgatattaggcttgtaaacaaagataattatttttatgaaaatataaaatatataagtgaagaatcttataattcaattaatgagtcttattctgatgtattgatagctaaatgcaagtattttattaattccgttgacaagtggagaaataaatcgatttatatggcaattgatgaatttatatggtatttatatatggatactgcttattatggatatgttggagctatgccaaatggagtacttaggcaagcaaacttaaaaatactttttcaaagagcaagacaatttgagaaaacgagttttaagggattatttaattttataaattttataaataaacttataaaatcttcaggtgacatgggaagtgctcaagtattaggtgaaaatgaggatgtagtaagaattatgagtatccataaaagtaagggattagagttccctgtggtattcttatgtgggttaggaaagaattttaatcttatggatttaaataaaagcatattgtaccacgacgaactaggacttgggccagactttatagatatagaaaaaaggtttagcacaggaactttagctaaggaatcaataaagaaaaagatgaaatttgaaacattatcggaggaaatgagaatactgtatgtagcatgtactagggcaaaggaaaagttgattatgacaggtacagtaggaaatcttgaaaaatcagctgaaaaatggttaggatcggcatctttagattataatcgcatatccccctcggaagttttaaaaggaaagtcatatttagattggatttgtatgtcactatgtcaacatagagatggtagtgttttatcagaaagttttggaactgaaaatttaatattaaaggatgataattctaggtggaaaattaatttttggaataagggcgacttaattgataagacaaagacagaagtgttagaacaaggtgaagaatatgagttaacaataataaataataaaccatatgataagtctatatatgaagaagtagataaaatattatcatataaatatccatttaaagcttcaacaacaattaaaagtaatatttcagtttcagatttaaagagaaggcatgcagaagaagatgatgatactgaacaattatatagagaaaaggtaaaagttgtccctaaatttcttcaagaaaagaaaggtcttactccttcagaaaagggtactgcagttcattttgtaatgaaaaaaatagattttaatagagtatcatctacggaggaaattaaagaacaattacacgaattatttgaaaaggagcttttgcttagcgaagaattaaaggtaattaatcctaataaaatactgagtttttttaggtcggatttagggaaaaaaattcttgagttaaattgtagtggagaaaagatttatagggaaatacctttttatacagagataagcagtttagaagtagataaaacacttgataatatatataaggatgaaaagataagattacaaggaataattgactgtttttttgaatataatggggatattatacttatagattacaaaacggattacgtcatggaaggtcatgaagatgaatttaaagagaagtataggaaacaattagattattatagtgatgcaatatttaaattaacaggtaaaaaggttaaatataagtacttatattcattttacttagaaaaggaaattcaagtaatataaatatgtttaagtaaaataacaataaaagcaagaagataaagataaatttatatgtgtcttcttgcttttttattgtctaggaaagtatagaattttttgattttgaaagtcagtgataccaatggttataaggatattggcttgtaaaaagtggtatcaagaaagagcgtggcgcagccactttgttcatagttattttattataattttactttccctaggtatgttagtaaagatccatttggcatcatctatagagagtctaatacaaccatgagaagaaggtttattcattgtataatctagaactgtagttttgtctttagcaaatggaactgaatgaaataaaatgtctccagtaatttgagtccaatatttaccaccttcttgatattcttctgaaaagaaccaatcacctctctctttaatagtaaatgacccaggaggtgtatcctctccacttattccagtggaacaagggaaagttttaaccaactgccatttatcagcttttccattataaacataagtcttttgatcttgaaggcttacgtttataagataaggtgttgaactctctatgtttaatgtattaatattttttgatgtaatattggttgttaaggcacgcgatgaagcttcagcaatagctgaatttttatctaagtattcttgttgtttttcttttatatctgctatcttttcttttacatctatgtcatcacccaaaaggtcattattgtctgaaattttagacatagcttcgctatagtaatcattgctaattaaattatcgcagtaaacaaataaattatcctttagtttactttttgattcatctaagtatataagtgaatctgtatagttaagatctaaagcagaaacttttttgaagaatgaaattgcctctggatattgtccattattaaaagaattaataccagagttataatttttaatagaatcttgaattaaatctattgaatcagaagccttatgtagatcatcatcattcactagattataacgttttatttccttaaactgaattaatgcattttcagaagaaattttcttatcttggatttcatctgataaagtattaattttagttctaagatatttggaaacatcatgactaatcatagataatttaaatggattaaagttttgtttagttatcaataaattattagcttcagaaaatttataattatcaaaatctgatttgaagttatttaaaagtttattataactgtataactcgtaaaagcagctagaagataatactattaataaagctagtacatacataattcttttaggtaatttttgggtttttgactttttataataaaatgtatttatgctcaaataaatgcctcctaatgaagtaactaatatatttagagtgaatttgaataagatattgcccattaatcttttatttaattacaaagccctcttttatttatataatattgacaataaaagtaaataataaaccttgatgtttaaactaattttaatatgtgttaatatacttaataggccttatggaagtagacaatatttatctggaggggaaaatgactaatagaactaatttttttataaagcttataacttctatatatgacataaaggttttttctaaatatgcgaaagaaggaatagtgcgatcaatctcatatgcagtattacttagtttcttattaagaggcctaaagagtgcatttgttcaatataggacttataatttagatataatatctttcgtagatcaaatggtagcatatttttcaataatactttttaatttattgtttaattgcttaattgtatcaattgttgcagcgctttttacagtgtttttaagaatggtagtcaaatatatagctttatattctttaaccttgtatgcggctacattgccattattaatacaaataatattagaaacagctaatcctaatataagatttgatactatgtttattgttggaacattaacctatgtaatattgatattaaagtatataaaggatgaaataataagaaactatacttagtaacataaggatggtatagatatatttctccaattattatctaaatttgtaatattcaattattaaacttaaataaacaaattatatagtcttttggaattagaaatatcatatcaaatttatttaatatggttgttagctgggaagttatatgatattatatattaagggtatatggtaaaaaaagtaaaaaaaattacaaaaggggatttaaaaatggttgaggttaatattttgaaagataatcagattgatagggagaatatattaaatagaaatgaccttattaagttatcgaaagatgaattaattagcaaacttattaatttatcagaatctaagaaaaatcaagaagattttattttgaatatttcacatgatttaagatcaccattaaatataattttaagtgttttacaatgttacaaggatgattataaagatatcaagaagtatggtaaatgccaggatcacatggatgttataaaaagaaattcatataaaatattaaaacttgtaaacaatctaatagatacaacaaaattagaaaaaaatcattatagtattaaaagagagaatttagatgtaattaatttaatagagtggaatatatcttctatagataaatatgctaagcagaaggagatttctttagtttttgatacaaatgttgaagagtgtataatggcagtcgacccagaagcaatagatagaataataatgaatttaatttctaatgcaataaagttttcgccaaaaggaagcaatatatatataaatgcatggaaaagtataaatcaattaaccatttcggtaagagatgaaggaattggaatacccaaggaagagcaaaatacaatttttaatagatttgttcaatcttcaagaaataaaaaatctgagaattcggggagcgggataggtcttgatttagttagatacttaactcaagctcacaatggtagtatcgaattgaaaagtgaagagaatgctggttgtgaatttataattaagctaccaatagaaagattacaggatgatgaaaataatagagataaatgcctaaacattaaaagtaaggtggaagttcttgaggtagagttttctgatatatatttgtagaagttaccataaacaaagatagttatctaaaaattaaaactaatttttagataacttagtcccaattgcatatgggactaagttgaataatagtattaaatttataaaattatgagaataatcaaattataaacttgattattataaccgcttgtgataagataaacttgttgtaaaaattgaatatggagcgttagttaaacggatataacataccgctacggacggtacattgagggttcgattccttcacgctctgccaaaataaaaagaatggtttacccattctttttattttataaaattttagcaccaatattttcaccaaataaaactttacactcaaagcctaatttagattgttctataatatcggcatctatttctatagacccttgttcaaagaatagtatagttgtagatcctccaaatttaaaatagcctttttcatcacctttttttactctaactttaggagaataagtttgaattattgaacctacacatgtagcaccaacctctatatgaagtacatctttaaagttatctgatttgaataaagaccattctcttttgttttcacaaaaaagtttaggaacagattttaaagctattggatttacagaataatagtgtccttttatatgatgattttcatatggaataccagaatctataaagtgaaatctatgataatcagtagggcataatcgtaatacaacgcatattccatttttatatttactagctacattatcatcattaattaactcctttaaactataagttaatcccttaatttgaattatattatctaagtcaatatcctcataagcagttattcttccatctcctggagagattaatatattattatctgaagttattggtctagcatcaaaatttaattctcttgtaaagaaatcattgaaagagttaaattcattaattttcttcttagacatagtcatatcaatattaaagctatttacaaatggtgaaattttggatttgcttagctttgtatcacaatacttcccatataacttagaaaataattttttctttgcaataagttcagtaattgttttaccaactggtgattcataggtccattctatatatttctttccagcgataagttcttcttcataagattttgtagttctattatatacttgaatcataaatacaaatgtcaaaactttatgaaataatttagagataatagctctaaagatttataatgttacagttatgacaagtatcctccatttcttattttaattagatatatctagttaaatctatagaataattatttagtaaataatatagaaaaactgatataaatcgaataaattatgtgtaacatacatagtttattttttaccttaatattaattttatcacagataatcaaaatttcaaaagtaagattatatgtactgaaagtttcatttttgatataaatagtaatatgtagaattgtggtttaataatgaactaaatgatataatatattgataatattagcataagtaattattgaaaaatgaggagaaatgttatgaacaaaacaaagaacttgatttttaaatctgcaataaaaatattttctgaatctggatacagaggtgctactatggatgatatagctgccaatgctggacttgtaaaggggacattatactatcattttaagagtaaagaggaaatatttaatttcattgttgaggagggattgcaaatattacaaaatcaagttattgaagttcagaatatgaatataggtcctattgaaaaattaataaaaatatgtagaatacaattaacatttttatatgggtatacagatttttttaaaatagtaatgagtcagttgtgggggactgagcatagacagaatgaattgcgtcataagatacgaaagtatataaatgaaattgaaattaatataagaactgcaatggaaattggggaaattaaaaaaggagatgtagaacttattgcattccaattttttggatcactatgttcatctgcaatatatgaatctatacatatagagaagataaatttagaagatattatagagagtactattaagtttacattgaatggattaggaatagatataaatagatatatttaaaatatgaagtttatattttaaattctagataaatataatcagttttagtttacactgatgattaaatataaatggggattgtatagagagatattttttatgagtagtatatatgattattaccaaattgaataaaataacgagggaactggggggatactaatgaaatttttagcaagtgatttagatggaacgctatttagagataacaaagtttcagaaaaggatttagaagcattgaggcgattaaaagcgtttggaaataagataataatttcaacaggaagaagtttaaaaggagtaaatagtattttaaaggaatatccatttgagtatgattacttggttatgtgtaatggtggagtgataatggataacagaaacaatattatacatgagaaatcaataccgaataaaatacagaatagaataatatctgatttttatgatataggagattccttaatatattatgatgatggaaatgatacgtatatgatagaaaataaatcagttgatgtttcaggtgtagatgctgatttttttaatcatttttctaatagggtaacattagaagaagcattgagtagtgtatcagattcacaaattatgagtgtgtttaatgtatctcaatctatagaaaaatcagaattggtaagagaaaaattaataaatgaatatgatgagtatatagaagcttttagaaatcaagtatttgtagatatagttccgaagaattgttcaaaaggaaatgcaattatgatgattttggaagatgaaaataaaggcgttgatagcttatatacggtcggcgattcaatgaatgatatttccatgtttaagattaccaataatagttatacatttaattcagtagaagaactaattaagccatatgctgataatcttgtagatcatgtttttgaagtaatagaagatatgctaagataaaagattaatttagagattataacttattcagcaaattaaatggaaaataatttatcaaagaaatataaaagttcagcaatttatagaaatgctgaactttttattataagtatattacatataattttaatttatatgcttaagtcattatttattagaattagaaaattctaagtattcatcaaatgtcatagttctatcaactatagaaccatcatctttaatatctatgattctatttgctatagtttgaacgaactgatggtcatgagaagcaaataatatgttactgttataatctttcaaaccattatttacagctgtaattgattcaaggtcaaggtgattcgtaggttgatctaacattaatacattagcattagaaagcatcattttagacaacatacatctaaccttttctcctcctgataatacattggcttcttttaatgcttcctcaccagagaataacattctgcctaggaatcctctgatatagctttcagatttttcctctgaatattgtctaagccaatctactaatgaaagattacaatcgtcaaagtattttgagttatcagctgggaagtatgcattagttatagttattccccacttatattcaccgctatctggttccatttctccagataatattttgaataatgtagttacggctatttcattaccaataagagcaattttatcacctttatttactatgaaattcacgttatctaatactttaacaccatctactgtttttgataaatctttaaccattaatatatcattaccaacttctcgttcaggtttaaatcctacaaatggatattttctacttgatggttgaatatcatctaaagtaattttatccaaaagttttttacgagaagtagcctgcttagatttagaagcattagcactaaatcttgcaataaagtcctgtaattccttaatcttttcttcctttttcttgttttgatcttttgacatttgaagagccaattgacttgattcataccagaagtcatagttacctacataaatttttatctttccaaagtcaacgtcagccatttgagtacaaactgaatttaagaagtgtctatcatgcgatacaactataacagttccatcaaagttacctaaaaagtcttctaaccagtttacagcctttaaatcaagaccgttagtaggttcgtctagaattagtattccagggttaccaaataatgcttgagctaaaagaactttaattttttctccaccagtcaattctgatacatttttaaagtgaagatcagttcctatacctagtccttgtaaaagcgaagatgcttcagattctgcttcccaaccattaagttcagcaaattcaccttctaattcagatgctttaattccatcttcatcagaaaagtcaggcttagcataaatttcatctttttccttcattatttgatatagtctttcatttcccattattacggtttctagtacttgaaaattatcatacttataatgatcttgcttcaagacagacattcttgtgttaggagcaattataacttcaccagtattaggttctacctcacctgataatatttttaagaatgtactctttccagccccattagcaccaataactccataacaatttcctggagtgaatttaaggttgacatcttcaaaaagcttacgtccaccaaatctcaaactaacatttgatacgtttatcaatatatttcgacctcatttcttcttaattgtaataatgcacaattagggaaaaaatcctttctatcgttaaaatatgttatcataaattaatttggaatttcatccttaattgtgcatcgtataaatagtttaactacatgttgcttattatatcatataattaatgatttttgcatttttaagtatttctataattttaaatttttgtattattaattaattaaaattaatgttatttataatttttggtactcccaaagcattcatctattattttttcactcatacgtctataaagattactcatgctaacatatgcgcatataagcagaagtttttcttcatagtctcctaaagaattatcttcattatttattagctttgcaatattatcatgaattttagtagaggaagattttaaatcatctaagtttgaatcatatatatcaagaaaagattgatatatgtcatgtaatggatattcttcttctttttcaaaagcatcaattatggggctcaagatagtttttatatctgtaagggacagtgcaccttttaaattgtaaattaaccccattaaaataagatgatttttagtatacttcttatttttaattttcattaaaagattacctttggcgtagttattaatcatagttttagtaagaactttgtcatcatcatttcttttagtgtagcttaatttactttcaaatagctgcattacttgatccatatataaatcaatttcaggaaaatcatttaagttaatgttattagatgatttttgtgaatttatatatgtatcaatattaaagtcattcatataatttcactcctcacatagcaatagaaactatgtcattattataattttaatattatcgaaaagaagtagataattcaagcatttatgggtaaaatactatttaataatataaaataaacaaaaatagggttgcaatatgaaaaaatatatgaaataattctaatatagcaacacatagttattaaaactatgtgggaataaatgggagggtaaaaatggagaaatatttaagagaacctattaatggattaactcattttattggagcagttttatcattatttgcactaatagcaatgttagtaaaggtatatacaaggggaagttctacaataacatttgtatcagttttatttttcgggataagtatgattttattatatagcgcatcagcaacatatcactcagtaatagcaaatgataaagtaataaaaattctaaaacggttagatcattctatgatatttatcttaatagcaggatcatatgcaccattttgtctagtggcgttaaatggaaaggtaggaataaatctatttctagcagtaacaatatgtgcagtaataggaattgcatttaaattatgttgggtaacttgtcctagatggctaagcagtagcatgtatataggaattgggtggtttgcaatatttgctatatatccaatgtctcaagttttatcttcagcaggattattatggttagttcttggagggataatgtatacaataggagggataatatacgcattaaaatcagataaaataaaagtatggttatttggaagacatgaaatatttcatatatttattatgttgggaactctgtgtcattttatttgtgtatttgtatatataatttaaatcagaattttaagttgcattaatctagtagattattgtatagaggataaaagagatacttattttaaataaatttagtatttcttttatccttatttcttataaaaatataattatattcatattgaattagatgttttattataaaacatcctttaaaacttgataagatatattaggtatagtaagataaattataaagaataaatagactttaaggggatggaaaaatgggctttcgtcaaaggttaaaagatgctagtagaatagtagtaaaggttggatcatcaacattaacttatgataatggaaatattaatttaagtaggattgaaaaactaacacgtgtattatctgatgtagttaattcaggtaagcaggttacgcttgttacatcaggtgcagttgctgttggtgttaataaattaaaattgaaagaaaagcccgaaagtataagagaaaagcaagcagtagcagcagttggacaatgtgaattaatgcatatatacagtaagttctttggagaatatagtcatgtggttggtcaagtattgcttacgagagatgttgtagaagatgatcatattagggaaaatgtatgtaatacatttgaaactttattagataataaaataattcctatagtaaatgagaatgatacagtttcaatagatgaaatcgagaatatagttagatttggtgataatgataatttatcggcaatagttgcatcattaattaacgcagatttgttaataattttatctgatatagatgggttctatgattcagatccaaggaataatgagagtgcaaaattactaaatgaagttagagaaataactcctgagttagaagagtgcgctggaggtgcaggatcaaatctaggaactggtggaatgatcacaaaactatcagcagctaaaacatctacaaaagcaggagtagatatgattttagcgaatggaagtgaaccagatataataatagatattttgaatggtgaagaaataggaactttatttgtatcatagataaaatcagaaatgggggctagaaatgagtgagttaataattaaaggacaaaatgctaagaatgcttcttatgatcttggtattgcatcaacaaagcaaaaagatgatgcacttatgattatggcagaagagttgataaaggcaaaaggagatataatatcagctaataagatagatttggatgcggcagtattgaaaggtacttcaaaagctatgctagatagattagcacttacagatgaaagaatagaaagtatggcagcagggcttaaagatgttataaaacttcaagatccaataggtgaggtaatatctatgtggcaaagacctaatggattacaaataggtcagaagagagtaccgttaggagttattggaataatttatgaagcaaggcctaatgtaacttgcgatgcagcaggactttgtataaagactggaaatgctgttattctaagaggtggaagtgaagctattaattctaataaagctatagttaaggcattaacaaaaggaattgaaagatctggtttgcctaaggcttcagtacagctagtagaagatacaagtagagaagtcgcaactgaaatgatgagattaaatgagtttatagatgttcttattccaagaggtggagcaggattaattcaagctgttcttaaaaatgctactgttccagttatagaaacaggaacaggtaattgtcatatatatgtagataaagactgcgattttgaaatggcaaaaaacattgttgttaatgcaaaagcatcaaggccttctgtttgtaatgcagctgaaaagttacttgtaaatgaaaagatagtggatgactttttgccgatagtagttaaggctttaagagaaaatggtgttgctgttaaaggtgatgaagtatcacaatctgtaattaacgacattgagaaagccgctgaagaggattggggaaaagaatatttagattatataattgccgtaaaagtggttaaagatgtagatgaagcaatttctcatataaataaatatggaacagggcattcggaagcaattattacagagagttataaaaattcacaaaagtttttacaaagagttgatgcagcagctgtatatgttaacgcatcaacaagatttacagatggttcagagtttggttttggtgctgaaataggaataagcactcaaaagttacatgctagaggtccaatgggacttaaagaattaacaacaattaaatatattatttatggaaatggccaaataagataatacagagaatataaagaatattattgcatgatattctttatattcttatatattataataattaaagataataaattaatattttcatcaataaatcaacataattaagtattgccaaggaaataatcttaaaatatataaattgtgttgtagtaatatataaatatttatatgataaaataataatattaaatagactttataactataagaaagtatagtataatccaatgtgaaaacgtattaaatggatctaaaaagggggatgacaattgtgaaaatagcattaatagcacatgataaaaagaaggaagatattattgaattttcaaagaaatataaggatgtactagctaaatatgagctagttgctacaggaacaactggaacgaagatatcagaagcaacaggtcttgaagttaagagatatttatctggtccatatggaggagaccaacaattaggtggtcgcattgcagaaggaaagattgatctagtagtattttttacagatccattgacagctcaacctcatgaaccagatgtatcagcattgcttagagtttgtaatgtacataatgtagctgttgttaccaatatgaaaacagcagaacttataattaaacaattttaaattatggacaaactagttaaaattatatatgcaaaaaataaaatgtacttatcaaatgataagtacatttttagaaaaagtagtgttaaatttgagataggtcaattcagaattaactgtaactgcctaaattttctgaatattttattaattatatgataacataaattatataaatttgcaattagcaatcatttgtgtataaatggagtatgaacatgattataattctaaggtaatagcaaggaaatatagcctgtaaactaatagaatatcttagaaggaaggattataatgactagtttaaatagatatacattaataactggtggcagtgaaggaattggattcgagttcgcaaagatctatgctaaaaataaagataatttaattattatagcaaaagacgaaattaagctgaggaatgctaaaagtaggcttgaagatgactatggagtgattgtagagataattcaatgtgacctatctgtggataaaggttataaaaagataatagaagttgtggaagaaaagaatttaattgtggataatttaataaataatgcaggcataggctgctttggtttttttcatgatttagaagagggacttgaagaaaagataataaatataaatattatagcattgactatgcttacaaaatacttttctaaaaagatggttgagagaagacatggaggcatcttaaatgtggcatcaacagcagcatttattggtggtcctaaaatgtctatatattattcaagcaaggcatatgttttatcattaacagaagcaattcatgatgagttgaaagatttgggaatcagggtaagttgcctttgccctgggcctgtaaggacatcatttcaagagaaggctggtataaaaaaatcacaaagatctaaaagatatttaatgaatgctagtgatatagcaaaatgtgcttacagagaattttcaatgggcaagacaataattattccaggatataaaaataagttgttgattttaggaaataaattaatccctagagcgttaggaagaagaattatattaaagaataatagttagtatttatattagctattattctttttttatataaatatgcatgtattatatagatttaagtatagaattatcataataaatatttagttacttaattaggatacatattttaattcacatataattaaggattaatgtacaaaaggaattatttgaattaatggtatatttatatctaaaataaaaaaaaatatgaataaaaattcaaataagtgtatttttatactttatataatcttatttttatgataagatttatatattgaataaattaaaaataaataagcaataaacaataagtaataaataaaaataattatattaaatattaaactatccttaaattatcttgacacaggattatctatcaactagaatagttagaaagagaaattttaaaagttaagatacactttaacttggtcctgtgaggccaaaaagggaagcataactatgatatttgaaagctgaatgaaaaatttcatagcttattttttgaattcaaatatttgtatggtatatcacaggatagtgaagagatcaggttttctgaaatctctttattatccttttgttttatattaaacaaagattcataaggtgtagttttagcaaaaatatatttgtaggaggcttaagtatgaaagcaaagcttatattagaaaacggcatgatttttgaaggaaaagcttttggatatctaaaagaaagcgttggagaagtagtatttacaactggaatgacaggttatcaagaagtacttactgatccatcttattacggacaaatagtaacgatgacttaccctttaatagggaattatgggataaaccttgaagatatggagtctgattcaataaaagtaaggggggttattgttagagaaaaatgtaatatgccaagtaactttagatgtgaattagaacttgaagattttttaaaacaaggaaaagttattggcttggaaggaatagatacaagagctttaactaaggttttaaggaatagtggtactatgagaggacttatcgcactagaagatgttgacgatgaatatgtgaaagaaaaaatagcaggattttctactaaggaagctgtaaagactgttacaacaaataagtcttatgtagttgaaggaacaggaaaacatattgcggttatggattttggcataaagactaatataataagaaatttcaaaaagagaggctgcaaattaactatattcccagcaacagcaacagcagaagatgttttaaatgttaatccagatttaatatttctatctaatggacctggggatccagaagatttagactttgccatagaaaatattaaaaaattagttgggaagaaaccaataacaggtatctgcttagggcatcaattattgggattagcgttaggtggtaaaactactaaattgaagttcggacataggggatgcaatcatcctgttaaagatttagaagctaatattgtgcatataacttcgcaaaatcatgggtatgtagtagagaagttaccagatgacatggaagttactcacgttaatataaatgatggaactgtagaaggaatgaaacataagactttaccaatatactcagttcaatttcatccagaagcatcagcgggtccaaaagacagtgaatatatatttgataagttcttagaatatgcactataggaggttttagtaaaatgccattaaataaagatataaaaaaagttttagttataggatcaggtccgatagtcataggtcaagcagcagagttcgattactctggaactcaagcttgtgaagcattaaaatcagaaggtatagaagttgtacttgtaaattcaaaccctgcaacaataatgactgataaagaagttgcagataaagtttatttagagccattaacattggaatttgttgaaaaagtaatagctaaggaaagaccagacagcttacttgcaggaatgggtggtcaaacagggcttaacctcgcagtagaattacatgattctggtatattagaaaaatacaatgtaaaagtaatcggaacctctattgcatcaattaaagaaggtgaagatagagagttatttagagatatgatgaatagaattggggaaccagttataaagagtgaaattgtaactgacctaactgcaggtttggagtttgctaataagattggttatccagttatagttagaccagcttatacattaggaggatctggcggtggtatcgctgatgatgaagaacagcttaaaaccatattagaatcaggacttcagttaagcacaattggtcaagttctacttgaaaagagtgttaagggttggaaagaagtagagtacgaagtaatgagagactcttatggaaactgtattactgtatgtaatatggaaaatatagatccagttggtatacacactggagatagtatagttgtagctccatcacaaactctttcagataaagaatatcaaatgcttagaacagcatcaataaatataataaatgcagttggaattgaaggtggatgtaatgtacagttttcattaaatccaaatagttttgaatatgcagttatagaaataaatccgagagtttcaagaagttcagcactagcatcaaaagcaacaggatatcctattgcaaaacttgctgctaaaatagctcttggatatggattagacgaaataaaaaatgctgttacacaaaaaacatatgcgtgtttcgaaccaacacttgattatgttgtagtaaaaataccaaaatggcctttcgataaattctttggtgctgacagagaacttggaaccaaaatgatggcaactggcgaaattatggctattggagctaattttgagcaagcgttcttaaaaggaattagaagtttagaaataggaaaatattcattagatcataataaatttaaagaatatagtatttcaaaattaaagagcatagtaatgaaaccagatgatgaaagaatctttgcattagctgagatgataagaagagattacatgatagatagaataaataaaattactggaatcgatatgttcttcttagaaaaaataaagtggatagttgaagaagaacaaagattaaaattaagtaaaatagaagatttagataaggaatggttacatcatttaaagaaaaaaggtttttctgataaagctatagctgatatgttaaaggttagcccagacgatgtatacagattaagagacatatggagtataaagccttcatataaaatggttgatacttgtggaggagaatttgaagcattatctccatattattactcaacttatgagcaatatgatgaagtagaagtatcaaataataaaaaagttatagttataggttcaggtccaataagaatagggcaaggtattgaattcgactacgcttcagtacattgcgtaaaagcgctaaagaaacttggaattgaaactattatagttaataataacccagaaacagtaagtactgattttgatgtatcagataaattatattttgagccattaacagaagaagatgttttaaatataatagaaaaagaaaagccagatggtgtaatacttcaatttggtggtcaaacagctattaagcttgcaaacttcttaaaagaacaaaatatagtaacacttggaactacagcagatcaaatagatatggctgaagatagagaaaagtttgatgaattactagagagattaggaatatcaagaccaaaaggtaaaggaatatggtctttagaagaaggattagaagaagctaggagattaaagttcccagtacttgttagaccttcatatgtaattggtggtcaagggatggaaataactcatgatgaagaagagttaacatactatttagaaaatgctttcgctaaagatagcaaaaatccaatacttatagataaatatctaatgggtagagaaatagaagtagatgctatatcagatggagatgatattttaatacctggtattatggagcacctagaaagagctggagttcattcgggggatagtgtaactatgtacccaagccaaaatatctctgataaaattaaagctgatgtattagagtatactaaaaaattagcattagcaattgggataaagggtatgataaatattcaattcatagaatttgaaggagaattatatgtaattgaagttaatccaagagcatcaagaacagtcccatatataagtaaggtaagtggagttccaatagtagatttagctacacaagtaatgcttggcgctaaattaaaggacttgggatatggaatagatgtatataaagaacctgaactagtttcagttaaagttccagtgttctcaactcaaaaattacctaatgttgaagtaagcttaggacctgaaatgagatcaacaggagaagttttaggagttggtagaaacataaaagaagcactttacaaaggatttgttggagcatatatgtatccttcaaaggaaaaaggaaaaatacttgctacaataaataagcatgataaagcagaattcctaccaatagcaaaagatttagcattagtaggatacaaatttattgcaacatccggaacttgcgctttattgaaagaagcaggtatagaagtagaagaaataagaaagatagatgaagaagaaccaaatattttagatatagttaaaaacagagaagtagacttagttgtaaatactccaacaaaaggaaatgattcaaaaagagacggtttcttaataagaagagcagcagttgagaggaacttaggagtaattaccgcattagatacattaagagccattgcagacgttgaacttgagaagtttgatgagaataaggatttagaagtattcaatatagcaaaataaaaattagtgagttaaagcagtattaaagagactaatcaaattactgcacttattaaaaattaaaactaggatatgacagatgatatcctagtttttttatgaaatatattagttaaaaggaaatattgacaagtgaacatatgttctgtataatacaattaatgaacatatgtttgctaaggagatgtgtattatgaacgaatcgggaaatttttttgttaagttaaactgtaaaagcattgataatattagaagcttgattatagataaacagagtaattacataaaacaacaagaaaaatacataatgtgtgctggaaagtatgataaaaatggttggacgttagtttttagagctaaaagttttaaagaggctgaagaactggcaaatttgaatccatttctaaatagaagaagcataaattaaggtacataagatctagatgaatcttcatactatatatctaaaattttattaattagctagtaaaaaattaaagaatatataaaaaataagctacgaaattttataatttagtagcttattttagatttcatattttatatctgaaataacaattgaaagattctctattaaatttactttagaaccaactttattaggataatcgcttttaagtatttttatagttggtcttaatggaaagttaggcatagtctcctcaactactcctatatcaccattactaaggcttacaattgttccttgagggaacgggataacaatcttacagaatacgttaagcatatcatgatcaaagagtgttccggcatttgacattaagtattcgagtgcatcactaggacacatagctcttttataaggtctgtcagaagttaatgcatcataaacatctgcaatacttacaattctagcgagatagctaattttattgccagatatactattaggataacctaatccatcaaatctttcatgatgttgcagaactataagcttgatatgagaacttaaactaaaaaagttattcaaaaatttatatccatatagagaatgattttttatcacttcaaattcttcaggtgttaatttacctggcttttgaagaatttcacttggaataaatgattttcctatatcatgaattagagcaccaatgcagagataagttagattacgcttagataaatttaagctgattccaagtataagtgatattacagcaacatttacacaatgagcataagtataattatccatgctctttatatcaactaaagaaatcagtatatttttatttgataaaacattgtctaataactcttctgctatattagtaattgaattgaaatattgttgttcttgctttgtatactcactaatacttctcttttcaaatttatgaacagaagctattctttctatatcagaaaatgtttctttaattacagatatagacttttgtcttaattctggctttataacatcttcaatttcagcagaactatagtcatcaattatatataaagagaatattttatattccttaattttttgtaacataatatcgtttaacagaataccagctctaagtagacatctaccatcaggggtgtatatgtctttgcctagcaatgaattttctcttacacattcaattggaattaatcgcatgattatacctcaccaaattaataataatcattatatcataaataacatgtaaatttatacaatgataatgcaaaaatcttaaaataatatctaaaattcgcatatatatgaaaatattttttatataaaaagacgtttactttgaatgatatagagttttttgataaaattatatttaataatccaataaaaaggttatgtaaattgagttaatacttgacaattcatttaattgtcaacatgagtagatgaaaaccataaattatagacattggataaataaagtaataaaatatttgtagataaaatatattaaagaataataaatcggatttatgttcacttttttatattgtaattttaaatattagttaatatttaagattcaaccaaagttatttctagatgtgaaatgtaatttcatatatctgattagttatttgtgcatacctaaatatttgaaaaaatggagtgaggacgttttgaatataaaaactgaccccataggattttttgattcaggggtaggaggtttaagcgtgatgagagaagcagtatctatcatgcctaatgaaaactttatatatttcggagattcaaagaatgcaccctatggaactaagaaagtaagtgaggtaagagatcttacaattgatgctgtggagtttttactaagtaaaaatgttaaagcggttgtgatagcctgcaatactgcaactagtgcagcaatagaagagattagaagtaaatataaacagatgtctataataggaatagagccagcattaaagccagctgttaagttaaatagaaaaggtcaaataataataatggcaacgcctatgacattgagggaaaagaaatttaaattattaatggataaatataaaaatgaggctgatataatatcattaccatgcgcagggctagtggaatttatagaacagggaatagtagagggcgaagatctagagtattacttaaaggaaaagttcaaaagttacttagataatgatataagctccatagttcttggatgtactcattatccatttataaaaaaggctttatcaaacgttattggagaggaaatacctcttattgatggtggattgggtactgctcaagaattgaagaggaaattaattgaaagtggtttactgaatgattccaaagaaaaggggaatatagaaatttgtaattcaataaatgatgataaagtgatagatttttgttatagtttaattaattttaaaatataaatatgattcagatttatcaaaatatataatataaggatgaatttaaatttacattttagataataatactaattaagattgatatcgagaggagaatatttaaagatgaagaatccaattattacaatgactatggaaaatggtggagttataaaagcagaattatatcctgaggtagcaccaaatacagtgagaaattttgtagacttaatcaatagaggattttataatggtttaatatttcatagagttattccaaatttcatgattcaagggggatgcccagaaggaacaggtattggtggtccaggatattcaataaagggagagtttacaggcaatggttttaagaatactttaaaacatacaagaggagtattatcaatggctagagctatgcatccagattcagcaggaagccaatttttcattatggtagctgatgctccacatttagatggccagtatgcatcatttggtaaggttattgaaggaatggatgtagccgataagattgttgcacaaaaaactgatatgtcagataggccttatgaagatcaagtaataaaaagtgttacagtagatatgcaaggggaagaaataaaagagcctgaaataattgaagagtaaaaaataccattctacaagactatagtaaataaaaagaagagaggtgtcatggatggctacaaataataaatgtatattagcgtatggattaaaagaggatgaaattaagaaaattgagagtcagaatattaaagttatagaaattaataataatatgactttaatgacattagaagatataattaatggaaataaaaatgaaaattcttacgatgaaatgcagttgagtgaaaaggcactaattttcaatggatttaaggatgaacaattgaaagttactattaggtatattagaagttttattcaaggtggagtgcttgctgtatctacagcacagaattacaagtggacttttaaatatctattagagcacttaattgaagaaagagaatggtataaagaacaacaaaaggggagaaagtaaagtgagtcgtgtaggagaaaatataaaacaagctagagaaaagagcggacttacagttaaagctttagctaaaaaactgggtgtagcagaaaaatatttaaatgaagttgaaatgggaagaaaagttgcacctgaatcattaatagataaagcaggcaaggtattaaaagctgatttaaatgacataagcatggttgttacagatgaagtattgatggaagaaagaaaaactttaaaggaaattcctaaaagaaatgtagagagttcagaagtttggactgatgctttctcatcagtacttagaagtgttccaatatatgattattcactatctaacaaaaagggttctaaagagatgcctattcattcaaataaaatcgagaattatcctcaggataaagtattttatttagaaattgaagatgatgaaatgaacggatttagaatgctaaagggtgatattgcatttgcacatgctgtgaaggatataagtaatagcggatttttcttaatagattataaggggaaaaggaaagtaagacaaataaaggtattaggtaattctaaattacttttagtaagcaatgctggaagtcttcttactgaaaccatggaattaaaagaagtagatgtaattgctaaattagaaagactagagattacattataaacaactaatgtaagaactcttatattgaagaattaaagcgtaggtagaaacagagaataattgaatttttcagttattctctgtttttgttacattaaaacatttaattgcatagtatatctatgaatatattaaattaaggtgtggtaattatgcctgaattggagacgcaaatatcttcaaaggtagatgcatcaataggattattaactaatgttccaaaagctatattagatgagttaggttataagtatcagagtcagggtaacaatgtggaactcactattttatatagagatactcaagaacaaacaaaatcatttgttgaaagcttaggaggaacttttcaggatttgggatttaactttgctgttgttaatatacccagagataaattagaacagttatcaatgagtaattctattcaatatatagaattaccaaagagtctatatgagcaagaccaagaaagtaatagagcatcctgtatacttcaattggctccagattttgatgtttcaggtgaggggatattagtcgggtttgtagattcggggatagattatactcaccctgcctttatggattccaccggaacatccactagaatagagtacatttatgatttaagtacaggaggaaatgtatataataagcaaatgataaatgaagcaataaaatccaatgatcccttctcagtagttccatcaatagacaatagtggacatggaactcacgttgcaggaattgcatgtgctgggggaagaataaatccgatgtatagaggagttgctcctaattcctctatagcaatggtcaaagctgctaggggaactgcaatcttaagctctcagattatgcagggaatcaaatttcttatggataaaggtaaagaactgaatatgccgctagttattagcattagtcttagcactaatgatggagcacacgatggaagcagcttactagagcaatacattaggacgatatctaatttagaaagagtatctattgttattgcggcaggaaatgaaggtgatgcaggtcatcatgttggcgggcaattagttaaaacacaaaggcaaatttttaatatagcaagccaagaaagatcaatagtaatgaatttttataagacaatattgcccaatatatcagttaatataataaatccaacaagccaaggaactggaaatattaatatacaagaaggttacattcaaggaacaataggcagtgatagatatgatatatatgtatctggacctaaaccttttgaattgaatagtgaaatcagaataattctttctgctagatctggctttcttgttgaaggtgtatggacattagaaataaatgttaccaatgaatacttaggagcatattcaatatggcttccagttttagaaggattaaatcctgcaactaaatttttagaacctaatcaatataatacgcttggcataccagcaacagtagataatataatagctgtaggaagttataattatagaaccaataatttatcatcattcagtggaagaggtgcacaagatcagaatatagtaagacctgatttagtagctccaggagaggatattgcagggccggtaccaaatggtggatatgataataaaacaggtacatcaatggctactcctcaggtggctggaatatgtgcattaatgatgcaatggggaatagttaaaggaaatgatccatatttgtttggtcaaaggttaaaatattatttattaagaggagctagaagaagacgtacagatgtgacatatccaaatccttcatggggatatggtgaagtgtgcatattcaacagcttaagagcgttacaaaatgatttaaatgccattttgacaagaggaaatataaattcaagagatatacaggtaacaaatagcatacctaataaatataatattctgagaaaaaatataaagagggaagttatggagaatacgagtagtggaaatacctcaacaaatattggtaggttaaagattcaatgtttcaggggggaggattatattccaattgatggagccagaataacggtaagaacaccacaaggatctgaaagtgttaatagtattcagctagttacagattcagttggattgacacaaataattgaattgacagcgccacctttagaatattctttgaatcctaatagcaaccaagtgccttatagtttatatgatataacggttgaaagagatggatttaacccaatagtaataagaggatgtcaagtatttcctacacaggttgcctatcagatttgtaatttgacaagtaactcaggaaggggaatgatgagacaagaggttataaatatacaaccaaatacattgaatggaaattttccacctaaaataccagaggatccagaaaagcagttacccccaccaagttctggagttgtattgcctcaaccaatagttccagaatatattattgtacaccaaggtgggccaaatgatccatcagcaccaaattataaagtaccttttaaagattatattaaaaatgttgcttccagtgaaatatattcaacttggaatgaatctgctataagagcaaatgtattctgcattgtatcatttacgctaaatagaatttatactgaatggtacagaggaaaaggaaagaattttgatattaccagttcaacagcttatgatcacgcatttaattatggaagaaatatttacgatagtataagtgctattgtagatgaaatattttctacttatataaagagagttggagctaaacaaccacttttgacacaatattgtgatggaaagagtgttacctgccctcagtggttaagccaatggggaagtcagcaattagctcaacaaggaatggttccatatgatattttgaaaaattattatggaaatgatatcgaactaactacagctgaaaaagtttctggaagcccacagtcataccctggtgaaccgcttactataggatcttcaggtccagcagtaagaactatccagaatcaattgaatagaatagctagaaattatcctttgatacctaaggttgctgaggatggacagtttaatcaaaagacagcagatgcagtaaaaacatttcaacaaatatttacattaccacaaaccggaattgttgattatgcaacatggtatagaatatcggacatctatgttggagtatcaaggatagcagaacttagagattcttcaagtttaagaagtacgcttggaatgaatgaatttatgcctccgattataccaggtttagataataaaagaggaattcctaaattttattattagaattatattaagatggtttttagatgtagaagcagttcccattttctctgtcagctacattatatagctgtgattagaataggagctgctataattaatgaaattattagaagatatatgtatgataaaaatttatttttctattccttctagattaaattcaggaatgaaatcagatatgttagcaccttcatcttgtataaatccattaactacgccaatatctaaagcataattaattaggctatcgtagtgttttggattaagtttcttatttatttctggataatcgcaagcattaaacataggaatatattgattcattaagcttatataaatatcagttttatatctattatatagaatatctattatcttttttgaatcaaaaaggagtccaggaagcattaggtgtcttacaataactccctttagtatatttccatttgaatcaaacttgggagtgccaacttgtcttagcatttcatctattatttttatagtattggaagcataatcattaactttagagtattttagagaatatttattattaaaatatttgaagtccggcaaataaacatcaatatatccatccaataatcttatagtttcaatagaatcataactattggtattataaagaactgggatagttaaattattttttttagctatttttaaggattcaattatttgaggaacataatgagtaggagtcactaagttaatgttgtttgcaccttttttctgaagttctagaaaaatttcagaaagtctttcaatagatatttctgcaccaacaattgatgtgtttttaatactatttttattaaaatcagaagaagatgaattaacactaataccctgacttatattatagttttggcaaaatacgcattttagattacagtgagaaaaaaatacagtaccagaaccatttccttgtgaaataggtggctcttcccaaagatgaaggaaagccttagccacttttatgatattgctagctttgcaatatcctatttcaccattatttctatttactttacaatctctattacataaagtacattcatttaataaatctagataattcatttatatcaaatcctttaagaataattattaatatattttataaaaagtatatcataattatttgatttgagtcgtgttagaaaaatcttttttatgcttaaaaaagaatagtatacattggaatataaaaatcaaacttaatagcccaaatataggatatagtttagttataagagttccaaatccaaattgggaaattaaaagagcaagacttattacgataaaaattgcttttttaaattttatattaaatgtttgctctagggttttacttatggaatatatgtcagaaacttcagtagaaaacatctccaaccagattatcacgagtaacaatgcttgaattaagttaccaaatctattagcgacaaaaagtaaaggaatctcatatttatatatataaggttgattaattgttaataataaatttatcattaaacaaagtatagttagtccaattgcgccggttactattccagtaatcattattttacttttcttcatttgagtgctaagtggtactaggactcctgaggctgaaagtgtattatatccagcataaagtactgttgaaataaagattccagttttttgttttggaaagctagcgatattatctaacgaaactgtatttctacaaaatgcaaaatataaaactgtaatcaaagtaagagtacaaattaaacctggaacaataaaggaattaacttcaattaatccttcagtatctctaagtagaaaaaatatggctattgcaatcattatcagtgagccaattatcttgggtattccaaaaaactgatgtatcaaagcaccacttccagcaagtattatagatgcgctggaaataagaaagagagttgttataaaaccagtgattttaccaaatatattaggacttattatattcataacatcactataagagctaagattataattaatgcttattctagaaattatagaacttattaagatatagaaaataccacaacctataattcctatgaaactagatataccgtattgagtaaaaaattctgtgatttcttttccagaagcaagaccagccccaactattgttccgataaacacagtggcaacttgaaatacttttactatttcctttttcaatatttatcccccttaaagaatgttccttttattaaatatataaggtttacttttaatttattctttaaatgttacaatatttaaagaaggtatattagacacataaagaggaggaaatatgaacagtttttgggatggaaaaagatatcatagtttaaactattttttaagaaataaatttggtgaaaaagtatttaaaatatctttagatggaggattttcttgtccgaatagagatggaaagataagtaatgggggctgtcttttttgtagtgaaagaggttcaggagattatgctggtgacagagaattgtctatttcaaagcaatttcatgatataaaggatatgatgtcacaaaagtggaaaagtggtaagtatatagcttattttcaggcttacacaaacacgtatgcacctattgatgagttgaaaagaaaatatgaagaggcattaaatcaggagggagttgtagctatcgcaatagcaacaagacctgattgcttagatgaggatgtattagaattattggagaacataaacaataagatttatctttggatagaacttggacttcaaaccagcaatgatgatactgctaaaagaattaatagaggatataaattagatgtatttgaaaatgcaatgagaaaattaaaagagagaaatattgatgtagtagttcatgatattttaggattaccgggtgaaactaaagaggatatgttagaaacaataaattatatagctcattcaggggctaaaggaattaaactgcatctactacatttaatgaagcaaacacctatggtaaagttatacgaggcaggagatcttaagtttctatcgcaagatgattatatagatcttgtgactcatggaataacactacttccaaaggacatggtagttcacaggttaacaggcgatgcaccaagagatctcttgatcggaccaatgtggagtttaaaaaaatgggaagttttaaattcaatagataggactctagaagataacaacttatggcaaggaaaaaatttcagagagtaactatatattaattctaatgattaggaatggagtaagtaaaatgaaaatagatattataatttcagcagatgatatagttgaaagcagagtaatgaataagattgcagttataattgatatatttagagctacatctgtaattataacagcactagataatggagcaagagaagttattccttatttgactattgaggaaacactggaatatgcaaagaaacttagtagagataattatattttaggaggagagagaaaagctgttaaaattgaaggttttgatctatcaaattctccattagaatatacaaaagaaaaagttgaaggcaaaacagtgcttatgactacaacaaatggaacaagagctttaacaaagtcaatggaggctaaaagagtttttataggtgctatgataaatggagaatcagtggcgaaaaaattgattaatataaatgatgatgtggttattattaatgcaggaacaaatggaaacttttcaatggatgattttatttgtagtggatatataattaaccaaatgctagatattaatagaaatatagagttaacagatatagcaaagactgcctgtatgatatataaagaaaatataaatatcttaagctatgtacgagaagcatctcactattcagtaatgaaatccttaggattaaataatgatattgaatattgcataaaaaaaagcatcatagatatagttccagaatataaagatggaaaaataacctgtgaatgaaaaactgtttaagattataattaaaagtaaaacacatacatgatttatttaatctgtatgtgttttacttttcgaatttactatgagtaaaagttttacgattatatgttttctcttgattgctttagtaaatcatttattcgtggagaacaatttctacctccgcacgaaccactgcctgcaccagtagccttttggacttcttttatagttgaagccccatttttaatagcttccttaatttttgatctaggtattgccttacaagtgcaagtttttgttaatttatctaaaattgcttcattcaaattattttccataatagtatctcctaaaaacattttttaagttaattgaaaaactaactttatcttaattatacattttataatctaaaataaaagtatagttaattaatattataacaataattataaaaaaatatcctatattaaataataatttttattattatattaatgttgtagataatggaataggaattaagaatgacgaagaaaagcgaatatttgatagattttatagaagcgatatagttagaggacaaaatattaatggaacgggaattggccttagtttattgaaatctatctcaaagaattttggtattaagttaaaagtgaattcagaatatggcgttggatctgaatttatattattaattcctaaaataattaaataagataatactaggaaaggttattttatttgctaaagggtctacatagctattttattcaaaaatgtaaagctatctaaatcattaagaatactagatttagatagctatgttttatattagtattattataactgtagtgagaaatcagtacagttatatatgaataaaattataaaaccaatgtccagattgaagacctaaaactattgccaatctaaataaacatatagttgatatgcctgctaagattccggtgattaatctccttgtattagtacttttaaagtacatgagatattgaccaaatccatcaattaaaagtggtagcatcagtaataattctataattatatgaatatttttagataacattacgtatgtgagtccgaggatatatcccagtaatattcccgtgcatcttgcacataatggaaattgatgacctctaaaaaagaatgatctctcaggtaattgatggcagaaaaacatatagtttaagacttttttacaattaagcatttaacttagtatgatgataagctgcctagcattccgagtacaaaagctagaacataaaagattatccagacaattattccaccgatcatccatttacatacgaggctggcactttgaggcttttcatctttccataagaagtataatattattcctactactggaaagcaacaagacgcaattccggctaaatgagatggattgtccaaagtacttttagaagacatattattaccagtagcaacaccacaatgtatacatacggcagcgttatcatctatttgttgtccgcaattcttacaaaacatatatttccccctttaagaagatactatttatagtattgttaataatacaacttatgagtaaatatgtagttatattcatgataatatttaattttatatcttagttaagctataaaattgttaatatgatatcgcactaactttataaaattaggattgaattattttataacattaattagtaataaagatacaattagtgtttgatcatgaattgacatttaaaaatcattaatatataattattacaataaaagacgatgattaggaaaagtatcttagatattatttttagagagtagctggctggtgtaaagctataataaatcttagagaaaatcacctaggagttggaggctgaaaggcgtaatgccgaataagttatcacgtaagagcctgcgttaaaggatagagtatgtatgtacttgaaataaaacatttaattttgcgtttagatgttttaaccttaggtggtttgcgaattcaacttcgtcctttaggatggagtttttttatgtttaaaaaagtatgcaaaaaggaaacaattcttaaagagaataatatagtttacttagctgaaaggggaatttttaatgtacaataaggtagattcatcaaaaggtaccgtcaaaattgaaaaagatatagcaaagctttggacagagaaagatataataaagaagagctttgactcaaattcagatggagaatattttactttttatgacggtccaccaacagcaaatggaaagccacatgttggtcatattttgacaagagttatgaaggatataattccaagatataaagtaatgaaagggtataaggttcttagaaaagctggatgggatactcatggacttccagtagagttagaaatagaaaagaaacttggaatttcaggaaaagaacaaatagaagactttggtgtagaaaagtttgttcatgaatgtaaagatagtgtattctcatatgttagcttatggaaggaaatgtctgaacaaattggattctgggttgatatggatgatccatatgtaacataccatgataattatattgagtctgaatggtgggctttaaagcaaatgtggaataagggcttattgtataagggccacaaagtaatgccttactgtccaaggtgtggaacagcgctttcatcccatgaagttgctcaaggatataaggatgttaaagatttaactgcaactgtaaagtttaaagttaaaggtgaagaaaataaatatatattagcatggacaacaactccatggacattaccatctaacttagcattatgtataaataaatcttatacatatgcagaagtaaaggtaggagaagaaatttatattttagctaaggatttagtaggtaaggttttaggagatactgaatatgaaatagttaaagaatttaaaggtgaagaattgctaggtactgaatacgaacaattattaccttttgcaaaagttgaaggaaaagctttcgtagtaattcatggagattatgtaacattatcagacggtacaggaatagtacacattgcaccagcttatggtgaagatgatagtcttgtttcaaagaaaaatggaattgcatttataaatttagtagatacaaatggtaattttgttgaagaagttactccatgggcaggaaagtttgttaagaagtgtgatgaaagtattgttaaatatttagaagaacgtaatcaattatttacagcacaaaagcacactcactcatatccacattgctggagatgtgatacgccgcttctatactatccaaaagatagttggtttgttgcgatgactaaaatgagagataaattacttgaaaataataataaaataaattggtatcctgataacactagaacaggaagaatgggtaagttccttgaaaatgttattgactggggtatttcaagagatagatattggggaacaccacttccaatatggcaatgtgaatgtggtcatcaagagtgtattggtagcagagaagaactagaagaaaaagcaactacagactgtaaggggattgaattacataaaccttacgtagatggaataaagttaaaatgtccacattgtggtaaggaaatgaagagaacacatgaagttatagactgctggtttgactcaggatcaatgccttttgcacaatggcactatccatttgaaaacaaggaaacttttgaaaagaacttcccagcacaatttatttcagaagcagttgaccaaacaagaggttggttctatacattacttgcaatttcaacatgtttatttgacacaaattcatttgaaaattgtatagtattaggtcacgttttagataaaaagggacttaagatgtctaagcataagggaaatgttgtagatccttttgaagtattaaatagtcaaggggcagatgctacaagatggcatttctatactgcaagtgcaccatggcttccaacaagattctctattgatgatgttgcagaagctcaaagaaagttcttaggaacattatggaatgtttattctttctatgttttatatgctgaaatagataaatttgatccaactaagtactctgattttgtttcagataatataatggataaatggattatatctaaattaaacacattaatcgaaacagttgatgatggattaaatacttataaaattactcaagcagcattagctattgaagattttactgatgaattatcaaactggtatgtaagaagaaacagatcaagatattggtcacaagagttaacaaacgataagataggagcttatgtaactttatataaagttctaacaaatttagttaaggtggcatcaccatttgtaccatttatgactgaagaaatctatcaaaatttagttgtgaatcttgataaaaatgcgccagaaagtattcacctatgcacttggccagaagttgataaatctgcaataaataaagaattagaaaaagaaatggatttagcatatacacttgttaagcttggaagaagtgctagaaatgctgcaaatgttaagaatagacagccactttctgaattacttatatcaacaaaatctcttccagattattacggagatattgtaaaagaagaattaaatatcaaaaaggttgagcttggagcagacctttcaaaatatgttaactttgaaataaaacctaatctacctgttataggtaagttatatggaaaattaattcctcaaatcagaaaggcaatttctgaaaagaaccaaatggaattggctcaaaagattcaaaatggtggaagtgaaactataatcgttaatgatacagaaatagttcttacaaatgaaaatcttttagttacaatgcaaggtttagaaggttatgcattcgcaggagaaggtgaacttggagttgttttagatacaactgtaacaccagaacttcaagaagaagggcatgtaagagaaattatttcaaagattcaaaatatgagaaaagataaaggatttgaagttgctgatagaataaatctttatgtatcaaataacgatatgttaattgatgttattaagaaattcgaacaaacaataaagaaagagactttaacttgtgaagttctttataatcaagaatctaattattcagaaacagttataaatagtgaaacattaaacatgaatgttgaagttgtaagataaaaactaaaatgactaggaataaaagattttattaatattcctagtcattttgatatctatatacatatttaatatggttttcatatatatttcttatataagattgtaaattagttaatatgtttataaatttaagattaaaaactatgatttttgacaaaacttacaataaaataataatttattttaagttatgttgatttataaggcaatatgttagtataatgagattatctagaaaaattcaaaggaggaataataatggctacttctattaaggatgttgcaaaagaagcaggagtatcaattgcaaccgtttctagagttttaaatgatatcgatgtagtaaacgaagatactaagaagaaagttttagatgcaataaaaaagcttggatacagaccaaatatagttgcaagaagtttaaaaactcaaagaacaaagacaatagggattttacttcctgatatatcaaaccagttttacccagaaattgtaagaggtgctgaagatgtttcaaatatatacgattacaatataatactttgtaattcagaccttgatatagaaaaggaaaaagaatatttaagagtacttaaagaaaaaatggttgatggtgtaatttatatgagtagttctcttaatgaagaaatattagaattaatcaatgaattagatttaaagactgttttggttgaaactaaggataaagaaggagttttaccaagtgtaacaattgataatgttaaagctagctatgatagtacaaaattattaattgaaaaaggaataaaagaaatcgcctttataggaactgaaaaagagagcaaaaatgcttggggtgatagatacattggttatgaaaatgcaatgaaggaatcaggaatagaaatagatcctgaactagtttatctaagctcaatgaaagtaaagagcgggtatgaaggcatacaaaaattcataaagcaaaataagaaatttagaggtgttgtatgtgcttctgatgatattgcaatgggagcaattaatgcattaagggataataaattggaagttccaaaagacgtaagtgtaattggattcaatgataattttgcagcttcaattttctatccaaagattacaacaatttctcaaccgacttatgatatgggttctgttgctatgagaatgcttataaaacttttaaacaagaaagagttagatgagccacattatgttttagaacatcaattagttgaaagagaaagtacagtttaatagaaaaatagtcaaattttatacttagttagtataaatattaaatgtatatgtttataaaggactacttcaagatagtttaaagctattttggagtagtcctttattagcgttaaagtaataattagttgcatgtacaactaatttgtgttaatataatttgtatgtaattatttggatatgaaatacgattattgttaatactacattaatatgattaagataggggagaagtaatatggattgctatcagcatataggtaagtatattggtgaaatacatagagccagctatatgtattttggcaagcgatttagtaaatttgggataggtgctggtcagtacttatttcttttaaacctttatgaaaatgatggtataacacaagaagaattgacgaaaaaggttaggttagataaagcgacaacagctagggcaataaagaaattagaggatgaaggctatgtaaggagaataaaaaaagaaagtgataagcgtgcatatagactggaactaactgaaaaagcagaacaaattaaagatgatgtatattctataatgaatgaatgggagtctaaaattagaacgtgttttactgatgaggaatctcaagaattaatgaatttgttgaataaattatctaagagttctttaattaataaggaggatattcatgaataagcagaatagattaggagaaatgagtgtagggaaattgttacttgagttttcaattcctgcaattataggaatgttagttaatacattatataacataatagatagaatatttattggacatatagaaggcataggtgaactcgctatggccggtgttggaattacaatgccaataatgtttataattttagcatttggtatgttaatcggaataggtacagctacaaaagtgtcaataaagcttggagagcatgataaggaaggagcagaaagacttctaggaaacgcatttacattaataataataattggtgtgttattaacgctgtttggtcatatatttgctaatccacttttgaaagcatttggagcgagtgaaaatattataggctatggagaagactttataagggtaattattagtggttgtatatttaatttgatgagttttggtttgaatcattcaattagaagtgatggaagccctaaaatagcaatggcgtctatgctaatgagtgctattataaacatcatcttagatccaatatttatattcggtttaggccttggagttaaaggaggagcccttggaactgttgttgcacagacaataagcagtatatggattttatattatttcacaaagggatctagtgtacttaagataagaaggaaaaatttaaaattggagaaggatgcagttttaagtatttttgctatagggattagtccatttagtatgcagcttgcacaaagtgcagttcaagtaataactaataattcattgcagtcatatggtggtgatttagctgtaggagcaatgactatagtgaacagcttagctatgatatttttaatgcctatatttggattaaatcagggacttcaacctataatcggttataattttggcgctagaaaatatgatagagttaagcaagcagtaaaatacggggttattacagctacaataatagtggtgataggatttataataattgaaggaattccagaagcattagttaagatttttaataatgaatcatcccttatagaagtaacagctcatggaatgagaatatttttaattatgctgccatttataggagcacaaattataattacgaatttctttcaatcaataggaagagtaaaaatatcgatgtttttaagcttattgagacaggtgataatattaattccatgtcttataataattccaaggttcaaaggattagatggagtatggatcgcaggagcaacatctgatatactatcagttataattacattcattgtattttttaagacatcaaaggatttaatgggaaatggaaaagaacaaaaagttattttagaaaattaaaagaataggtatgcctcaatatagttcctaatatattgagacatacctattttatttaaaggatcccttcgttttttaaaatatcttctaatttttgaactctattcgataaacaaataaacttttcttttaattgttcttttgaaggctcatcattgtttataactttttccatatcttctacagtctttagagcttcttctacatcttgttgagctatctttaaatttgaatcattcataaaaattctccttaaaataatataattatgtttagtaattatatcctatcactactaaaaaataagtgcaaggaatataaatgtaaagaataactatactatgggggagaatatgataaattatatttggttttttctaatattttttggaattctagttggattattgactggaaatggagagattatttccaaagcaataattagttcgtcaggtaatactgtaacttttatgattgagcttacaggaataatgtgcttttggtgtggagttatgaaagttgcagaaaatagcggactcactgaaaaattatcaaagttattaaagcctattcttaaaagaatttttaaagaagctgcaaaggatgaaaaagctttaggagctattgttatgaaccttactgctaatatgatgggtttatcaaatgcagcaacaccctttggaataaaggcgatggaagaaatggataggcttaattcggataaagaaacagcctcaaatgatatggcactttttcttgtcttaaatgctacatgtatacagctagtaccctcgacgataatatctataagagcagcctgtaattcggttaatcctggaataataattttaccgactatagcatcaacagcaacagctgcaatagttggagtaatatgctgcaagatattacagaaatacttttagaaatttcaacaatgcaatttaattagaaatgctgcaaggaggattatagaattatgtttaattacttaagtaaaagcataataccaataatatttttacttataataacatatgggatgttcaaaggaagaaaggtttatgaatggtttatagagggtgctaaggatggattgatggtagtcttaaggatatttccatatcttttagctatgataattgcagtgcaagtatttagagaagcaaaattaatggatttactaaataacctaattgctccacttgcaaatttaataggattgcctaaagatctaataccattactaataataaaaccactgtcaggaagtggtgctattggtgtgtttacagatataataaaaagtttaggaccagatacaagaacaggtcttatagcgtcagttgtaatgggaagcacagaaactatattttatacaattacagtgtattttggagcaattaaggtaaaaaagataaggcatactttatgggcagcagtatttgctgatgcaacagcaataattatggctatatttatggtaaatatatgtttttaaaataacaaatctaattatttgataaaatttgttagttagaatatttattagttagaatcattggagtattatattaacataggaatatattttaatagtagaaaagaggctaaattatgaataaagatacttatatagaaaacagaagcaaacttatgaatagtatagaagataattcagtaatgatattatttgcaggtaaaccagctaaaaagactggagatgaattctatcaatttactccagataagaatttttattatttaacaggaatacaagaagacggacatttggttgtattatctaaatataataatatagtaagtgaaaagttatttctgacagatttagatttagataaagaaatgtggagtggaaaaacattaagagattttgagggaaaagagatatccggaataaatgatgtatcttatatgaaggagtttacttcttacctaaatgcattaataaagggaaaagaaaaagttaatttgtatctagatttggatagagaagagtttgaagaaagtgactctgtatcaaatagatttgcaaaagagattattagtaagtatccacatattaatataaagaattttacaagtataattgcacctctaagaatggttaagtctgagaatgagataaaagaaatgaggaaagcaatagaaataactattgaaggtgtaaagtctttaatgaaaaatgtgaaggctggaatgaaggaatatgaaatcgaggcttattttgattttgaatgcaaaacaagaggcgttaaagattatgcttttagaacaatagcagcagcagggaaaaatgcaacaatacttcattatgtagataataacagtgagttaaaagatggagatttaattctatttgatcttggagctcagtggaatttatacaatgcagatataacaagggcattccctataaatggcaagttcactcaaagacaaaaggaagtttatgaagctgtacttagagttaataaagcagtaattgaaagaataaagcctggagtggattcaaaagaattaaatgtatgggctaaagatttaattgcacaagaatgtattggattagggattataaaagaaaaatcagaagttaacagatattattggcataagataggtcacagtttaggtctagatactcatgatttagggatacttggtagagaattcacatttgcagaaggaatggtatttacagtggagccaggtatatatatagctgaagaaaatataggtataagaattgaagatgatattttagttactaaagatggatgtgaagttttaactaaaaatatgattaaggaaattgatgaaatcgaagaattcatgaaataatatattattgcagaaaataagagcctaataagattaagatacatatatgtgtttacttattaggtcttatgacgttcttaaaaaatacatttaaaagagggaataatatgagagtatcagaaagaatacaaaaattaagagaaataatgacaaaagagaatatagattattatatagttccaagtgaagattttcaccaaagtgaatatgtggctgaatgttttaagtctagatcatatataacaggatttactggttcagcaggaacagcattgataggaatggaaaaagcaatactatggacagatggaagatactttatacaagccaatgaacaattaaaagattctggagtagaactttttaaaatgagaattcctggatggccgactttagaagagtggttaatggaaaatatgatggatggtcaaactttaggttttgatgggagagtattatcggttaatcaatataaagaaattctaaaaataaaagaaaataaaaatataaacatagtaatgaataaagacttaattgaagaaatatgggaagacaaacctaaaatgcccaaagaaaaagtttttttgcatgaagtaaagtattgcggaaaaactgcaaatgaaaagattcaagaagtaagaaatgaaatgaaaaaactatgtggaaactcatatataatatcatcattagatgatatagcatggatttttaatattagaggaaatgatgtaaagtatacaccagtagttttagcgtatgcattaattgatgaagagaaagctgtgctatacatagatagggaaaagatatcatctgctgatgaaaaaacgctaactaaagaaggcataataataaaaaattatgaggatatatttgaagatataaaagaagtacaagatagtgttatattagacccaagtaaaataagtgcgtatatatacaatcagattaataaaaaaataaagaagatagaagaaataaatataactacaaaattaaaggctataaagaataataaggaaatagaaaatcttaaaaattgtcaacttaaagatggtgttgcaatggtaaggtttattaagtggattaaagaaagtctggataaggaagatataacagagataaccttggcggaaaagttatgtaattttaggagtcaaggagatttatttattgaagaaagctttggaacaattgcagggtataaagaacatgcagcaatgatgcattattctgcaacagaagaaagcgcatataagttagagaaggaaggaatactgttagtagatagcggtggacaatattttgatggaactacagatataacacgtagcattgttttgggaaaattgactgaagaagaaaaacgagattttacgctagttctaaaagcgcatatcaatcttatgaaagcaaaatttttaaaaggaactacaggatccaatatagatattttaagtagaagggttttatgggaagaaggaatagattacaagtgtggaacaggtcatggggttggattctgcttaagtgttcatgaaggtccacaaacaataaggccagtaccgaatacaatagaattagagccgggaatgatattaactaatgagccaggaatatatagagaaggcaaacatggaataaggacagaaaatattatgctagttgttgaagacgaaagaaatgctgagtttggagaattttataaattcgaaactatgtcatattgtccaatagacttagatggaattaatgttcaattgctgacagaggatgaaaaagagtggttaaataattatcataaagagacttatgatagattaagtccattcttgagtgatagtgaaaaacaatttcttaaagaagtaactcaagaaatataatttaaacattataaataggttattgcacttgagagcaacaaatagtataatgtaaataatttggggattaatatatattataggttaaaaattttgcctataagattgaaataagataatctctgaagtaaactaataataattaaatagaatgctatgaagagaagagtagtaaaagaatcattccataagagagctaatatatgctgaaagttagcgtttgtgaattttatgaagatggtctcagagcatgtttcttgagtcaaaattatttggttagggaaatacggaagcgaccgttatattgcagggtgatgttggtcacctactgagttatttgctgtgaggtaaataagaattagagtggtaacacgtataatacgtctctatataggttttaatacttatatagagattttttttgtgtttatgaaagactaaagataatgccaagataatttgaagacaaaaccatgaagatgataataatcttaacaatatatattctttagaatatatattctaatattctaatattctaatattctgaagaatatgcttaaaaaatgcgggctggatatgtcatgacacaatatatagaaggcaaaaattaatattataatagaaaaatagcaataaataattgctttaatataaggaggacacaaataatgtgtacagattgtaaaaaaacatattatatcacgacaccaatttattatccatcaacaaagcttcatataggtaatacctatacaactgtagctgctgatgctttagcaagatttaagagattaacaggctatgatgtaatgttcttaacaggaacagatgaacatggtcaaaagatccaaagaatagctgaagaaaaaggaatcacaccaaaacaacacgtagatgaagttgttgcgggtattaaagatctttggagcatgatgaatataagttatgataagttcattagaactactgatgattatcatattaaagctgttcaagatatatttaagaaattatatgatcaaggagatatatataagagttcttatgaaggttggtattgcactccttgtgaatctttctggactgatacacaattagttaatggaaactgccctgattgcggaagaccagttgaaaaatcaaaggaagaagcatatttcttcaagatgagcaagtatgctgataagttaatcaaatatattgaagaccatccagagttcattcaaccagaatcaagaaaaaatgaaatgctaaataatttcttaagaccaggtcttcaagatctttgtgtttcaagaacaagctttaactggggagtacctgtaacttttgatgaaagtcatgttgtatatgtttggattgatgcattatcaaactatatcactgcccttggatatggccaagaaaataaagatttatataataaatactggccagcagatgtacatctaataggaaaagatattttaagattccatactatttattggccaataatgttaatggcgctagatctacctcttccaaatcaagttttcggtcatggatggctacttgttgacggtggaaaaatgtcaaaatctaaaggtaatgtagtagatccagttgttcttgtaaatgaatttggagttgatcctgtaagatattatttattaaaagaaattccatttggagcagatggattatttaataatgaaatatttataaagaaaataaattcagacctttgtaatgatttgggtaatcttttatcaagaacagttgcaatggttgaaaaatattttggtggagaaatgccagctcaagatgaaaaagaagctattgatgatgagttaataaatttagcattatcagaaccagctaaaattgaggaagcaataaacgaattaaatataccacaagctttagaatatgtttttgaattaataagaagagcaaataaatatatagatgaaacaactccatggatattagctaaagatgaaagtaaaaaagctagacttggaacagttctttataatttagcggaaagtcttagatttgcatcagtaatgatttcagcattcttaccagaaacatctaagaagattaatgaacaaattaatactacagaaatttcatgggaatcattaaagtcatttgatggaattaaggcaggaactaaggtagtaaaagctgataacttattcccaagaatagatgtagataagaaattagaagaattagaagctttaaaggctgctcaagcgccagctaagagagaaattacacctataaaagaagaaataacaatagatgattttgaaaaggttgatttaagagtagtaaaagtattagcgtgtgaaccaataaagggagctaagaaattattaaaattaaaagttgatttaggtggagaagaaagacaagtggtttctggaatatctaagttctataaaccagaagaaatagtaggtaaaaatgtagttttagttgctaacttaaagccagtaaaacttagaggggaattatcacaaggaatgattttatgtgctgcaacagatgatgacagtatattaaaagcagtggatccaggtgagattccaacaggtagcattgtaagataattataaaaaaatagaacgtctcacttaggggagtgagacgttcattaaccatactaaataaatggttaaaaggggtaaataataatgctttaactactttacaatattaattttaatgcattaatatgtcatctaggtgtcaaaaaataaattcgtaaaaaaattatttacgaatttatttttattttatgctttagcatgtaagaaaaccacctgctaagcgggtggtgggtgtttggttataccgttaaaaactatgagtattctaaaaaaatgcttttaccacaaactctgtgctaccactaaactaatactgttaatgcgaaactataagttacgaaaaaacttaagtttgataactgcatttaaaatatagaataaccacacaattaaaaaatatatagcaagtctaacagcgagaaaagactgctctatgtattttttagccttacaggcgcagagcaagccacccgtttgacgggtggtcctgactttaattgctatgatttgcattgaattatatagttttaagtaagattatcataaagaggtataagtaataattttatgttattatttaagtaagtaatgctaaatttaaaagcagtagttttagaatatgataatttggaaataatgttgataggaaaggaatatttgtttatgaatcaaaaatttaaaataatagatagccatgctcattatgatgatgaagcttttaatgaagatagagaatctttactaaatgagattaatgaaaatggagttattggaatcctaaattgtgcatcatcatatgatagtttaaaaacaacagatcaactaactaaagatcatgattttatctttggtgctttaggaatacatcctgaaaatgcgaatgagatgaaaggcgatacgctagatgaaattaaagcttatattaagaataatgacaaaatagtagctattggggagattggattagactattattgggatgaaaatccacctaaagatattcaaaaggatgtatttagaagtcatatgaatttagctaaagaactaaattatccagttgttattcatgatagagatgcacatcaagatacattagaaataattaaggaattcccagaagttacaggtgtagttcactgtttttcagggagtgtagaatttgcaaaggaatgcataaaattagggtattatatagggataacaggtgttgttacatttaaaaatgcaaaaaaggttgttgaagtagttagagaaatccctttagaaaagatacttgtagaaactgattgtccgtatatggcacctgaaccaaacagaggaaaaagaaataaatcagattatattgaatatataataactaagatagcagaaattaagaatattgacccttatgaggcaaatttgagatttaacgagaatttttttagattgattagaaaggaaaaataaggtaaaatattaaatgtacactttaaatataatttctgtattcaacataaagtaaatctaatcttaaactgaaattatcattaagtttaataaatgtttctataatttcatatcattaaattttaatttcataatgaagtaatattaaataccgctatcatttttatatattatattttatgcacaaagtgcattattacaatgcttcattatattgcaagagtttactaatttgacaagtctagaatattaatatataattcaaaagacactcttgccaaaggagggaaaataatgatagaaaaattgagacaatttattaggcaaagtttttctaacggtccgaaggcaaaaattataattggaacaattgcgatagcatttgtagttgttacagcagtgactataatgagcataagaaaaacgctcgtaataagtatagacggtaaagaagcgacttttgtcacttacaaggggactgttaaaggtgtgttgcaagaaaatgggatagaagtatcgcctaaagataaagtgcaaccatccttggaatccaaagtatctgaaaaagaaactattaaagtaaaaaaggctgttccagtagatattaaggctggtggaatggaagtacaattgcaaacggcagaggatacggttgaggatatgctggatgcagagaaaaatacattaaaagatcaaggaatagaatttgacaaagacgtagatgaagtatcaccatccctagagtctaagttagagggtaacgaaagtgtccaacttgtcaaagtggaaacaaaagatgtcaccgaaaagcagccaattaacttcgatacaattgtagaaaaagatgaaaatttggacagtagtgttcagaaggttaagagtgaaggagttaatggtgagaaacaaattacttatcaaataatatataaagatggggtagagatttctcgtaatgtaaagagtactaaaaccatattggaaccacaaaatgaagttgtggtcaaaggaactggtcaagtgtacgcaagcagaggtggagacagaataacttataagaaaaagattaattgcacagcaacagcttatagcaaccattctactacagctacaggaagaacgcctgttagaaatcaaggtggtatgagtacgattgcagtagatccatccgtaataccgctaggaagtaaagtatatgtggaagggtatggatatgcaattgcatcagatacaggtggtgctataaagggcgacagaattgacatataccttaattcgtcaaatgaatgtgattcatggggaagaagatcagttgatgtattagtagttgcttacccagggcaatggtaagctattttaagagataacagatgttatctctatttttttctttgaatttgtggatgttttatcatattattagaaatgagataaaataaattaagggctattttatgatataaatatattaacgtataaagtaattattaataaagaaaggaagtaacgtattgataaaagaagtaatagtcgttgagggtagagatgacgttgatgctgtaaagaaagctatagatgcagaaataattgctgtaggaggatttggcataaatgcaaaagtcatagcaagaatacaggaggcccaaaaaagaaaaggtgtaattgtattaacagatccagattttgcaggggaaaaaataagaagaataatagcaaaaagagttaaagggataaaacatgcatatattgcaaaagaagatggacttaagaatggagatattggagtagaaaatgcatgcccagaagttattttgaaagcacttgaaatggcaaagataacacaagaagaaaaacaagaattttttactatgcaggatatgttttatttcaagcttacaggagataacacttcaaagattagaagaaatacgcttggtaagttattagggataggttatggaaatgcggcacagatggtttctagattaaataattacggaataactaaagaagaatttactaatgctataaaagaaatagaaaaacaattggaagtaggtaagaaataaatggatttaaaagatataaaaactcaggaactagtcaaaaaatataattttaagttctcaaaaagccttggacaaaatttcttagttgatgattctgttcttgatgatatagttaacggagcagaagttaacaatgaggattttattatagagattggaccaggtgtaggtacgcttactgctcaacttttgatgaaagctaaaaaggtaacatctattgaattagataatgatttaattccgatacttgagcaagagttgggggaaaatgagaattttagtttaatacataaagatgcacttaaagtggatttcaatgaacttattggagatgagaaaagtgttaagcttgtagcaaatcttccatactatgttacaacccctataatagttaagcttctaaaaggtggatataattttaaatcattaactataatgattcaaaaggaagttgcagagagaattaatgctgaacctaattgtaaggaatatggtgcattgtcggttttagttcagtattattgtaatacagacataataaggaaggtaccaccaacttgctttattcctagaccaaaggttgaatctatagtaataagattagatagattagatgaaccaagagttaaaactaaggatatcaatattatgtttgagattgtaagagcaggtttcaatatgagaagaaaaactctatggaatgcagcaaaaacattaaaagtagataaagaaaaattagaagaagcatttaaaaaatcaggaattgatcctaagagaagggctgaaacattaacactagaagaatttgcggttttatcagattgcatatatgatataagaaactaaaaggttgagaatgagtaattattgaattattcattctctattttttagtttctattaaatttgctgtgctgcgtagagtatgaaaatatagaaaagtattagttaaatcataattctaatttccaaacatatactatatggaataaatatatgtggagggaatatagggttggcacacaacaaattgtatagaaactttataatattacaagaagatgaaagaggatattctcaatctaatgataaagctttgtctggatatgctaaggtggaggccaaaggtgataaatgcaaaatctcattttatgcgcaaaaccttaggcaggaagataattattccatggtacttatatgttgtaagaaggatttaaaacaattaattaatattggacctttagcaataaatgaagtcggaaagggagatactagcaaagaatattatgtaaataacatagctggtcttggaatatcttatgaaaaaatatctggtgctgctatatgcagagtcaaagataatgaaacagagtttgtaatgcatggatttatgaatggagaagaatctgctgataattggagaaagtttaagattataaaggttgattctaggaaatctgttgataaaacaacattacaaactaaggataaagaaaatttgactgtaaatacaccaagtaaaactatagcccagtcagatacaaaagtggatgagttaataaaggcacctaaattacaagatgaatcagttgaacgaaaaaaagatgagattgatcttcaacctaaagctaacatagaatctaaagttgaagataaacaaaataggattccagaagatcatcaaaacataactgaaactatagataatttagatgaggaaagaaacaagaataaagagagcaaaaaatgtgagaaagagtataaacatgacaagtgcgacaagcatgataaagaagataagtgcgataaacacgacaaatgtgacaaagaagataaatacgataagtgcgataaacatgacaaatgcgataaagaagataagtatgataagtgggataaacatgacaaatgtggtaaagaagacaaatacgataagtacgataaatatgacaaatgtgataaagaagacaaatacgataagtatgataaatgggataaagatgaaaaatataataagtgtgataaacatgataagtatgactatttcgaaaaagaagaagatatagatgatgttattggcaaaatagctaagaaattagatacttatgatggggtaatagacttaaaagtaagtcatcacatgtatgaggatgttatagtatatggattcataaaggataagaagaatcataattctaaatggaagaaattcaaattagaaaagaaatgtagaaatgaaaatcaggatatagataatgtgcaagttagctctagaagaatagaagaaaactttaaattggataaattaaataacgtagatacatcagatagaatggacataatagatttcgatgaatatgaaaataatattcaacaaggaaatttaggtggatccacaggagcaaatgatacatctacgatgaatacgactggtacagggaatactacgactggtgcaggggatactactggtgtaggggagtctatagagcaaggcaattcaaataatggaatgagcgagactgatacaggaacaatgtggcaaccatggtcagggaactcggcaaatcagactagcgcaggaggtatgaaccagacaggcactaatactgtagcagatcaaacatcatcaaatactggaatgaatcaaatgaacacaggaacaatgtggcaaccatggtcaggtggaacaatgaatcagacaggaacaatgggacagccagagactagcggtgaaactggaggcatgggacagctagacttaaatatgggagatacatcaaatgaaaataataataatcaaaatacttcaaatcagggattcactataagtggagatataggtaagtattttgagaagttagcacaagattttaaaccgtttattggaaaattaaatgatataaacttctgtaagtggtataaaatcattgtaaatggtatagaagacttatcaaatgattcaaattataacaaatatacattagcatattatccaatgttaaattattatccttacattagtaaaacaggacatttcttattaggatataaatgcaataaaaatggagaaatgcaatatattatatatgcaataccaggaagcaaagaaaaaaatgatcaaccatatggtggaagaacaggtttcgtaacatggactaatgatagtaataatggccaaggatattggttaatgttctatgattttaaaaattcttcaatcgtaattccagcaagatagagaacattgttatgaataagaagcagttgattgttacgtcaacattgttatcattgatgttgatactggtcataacccagggcttctttaaagaaaatttcgaacaggtaattcttatggatcagggaataagcaaatttaaagaatattcttttgacgagaataaatatgttatatctctgccaagtgaatggaatgtggaggaaaaagaaagtaaagggcaatatgtgagttatgaattagattttaaagacaaaaataataagcttactggtttattgcaagtagtaaatacaaaagaggatataaacgtatttgcagaaaaagatttaaatagtcaacgcctagaatattataattcagaattaacaccttttaaaaattcctataattcaggagtattagttaaatatgaaacaaaagtaaagaatgggtatgattttaataatgaatgctattatctaaatttagaagaaggtaaaacagcaaagatattatttaatcttaagtcaaaggattataaggataatatgaagactattttaaatacgattatctcaagtattaaatcatctcaaagttgaaactaaccaatttattgtatataaagttttctggatcataagtggttgatgtgaaaagattacattatatgcttaatataaaaaatataattgtatgaatgttgagttgatgagttaaataagatttgccaaggataagcataagtattataatttaagtatcaaggagaggccaggatagcttctccttgatacttatttgacgtttggaggcgagcaatgaggataatactatttgagatatttgggatacagataaagagttatggattaatgattgcaattggaataatagttgcagctgctatatttataaataaaggaaagaaaaaaggctatgatgaggattccttattaaatttagtaattttagctgtaataggtggagcacttggtggaaagggattatttatattaactgagattaaagatattattaaagagccaagcatattactgaactttggatatggatttgttatatatggtgccataggtggaggagccttggctatgtacttatattctaggaaaaagtcttggaatattgttgaaatgttggatatgacggttccaggtcttgcaatagcccaaggttttggaagagttggatgttttctggctggatgttgttatggagcagaaaccaagttaccaataggtgttacatttccaaagggatctttagcaccaactggaatacacgtgcatccaacgcaaatttattcatcaatatttgactttttgttaggatttatgcttttgtactatagtaaaaaagaaaaacaaaaaggaaaaatagtaggactatatttaatagtatatagtataggtagatttttagtagagtttttaagagatgatccaagagggaatatcgggattctatcaacatcacaatttatcgcaatatttactttggtgattggtattgttgtatttaataaccataggattttcaaaggagcgaagaagaacagtgagaaatagtaagtttttaacaatagttttgccattggtagtagtctctagtatgatgctctcagggtgtagcttcattgataatatagaagttaaaatgaatcttaaaaatcaacaatttgattatataaagcaaaataaggtcgataaaattatcatacaaagtgttagagatagtggatttaggtttgtagttaatgatcctaaagccatagaagacatttacaagattttatcagatggaagtgaagtttcaaagaaaagctcattagatccagattatatttttgaggtgtgcactggagatgaagtgaggaagtatcagtatgtagttggagctaacgaacatgggacaggaaacttttatgatgacgataaggcattttcagtacctaaaaatttagagaatacaataatgcaaaatctttcattcataagaaagccaagagactttaattatatatactatcaatcaatattaaaagttattgataagaaaaaagatagcttatccaacggaaacaaagttggagttaacatagctggagatacagattgtttgaaatacatattttctgtggatttagaagattttaagaaaagtttgaataaaactttacctagtattgatttagtaaataataattatgaagattttgatacaataattaaagttaaaaatagaggatataatagtactgttttcaaaacactaataacagtagataataaaaaggataattccttcgaaagctattatataacagcagaatataattataaagactgggatattaaaataagtgagcctaataaaaccccacaagattggtaagcaaaggagcatatataaatgagttgtgaaaattgtaaaagtaaagacacatgtcaatctaaaggaacaggatgtagtgaagaaagtttaaaattaacatccagatatggaaatattaaaaatgttataggtattataagtggaaaaggtggagttggtaaatcaactgtaactggaatgatggcaagtatgttatctaagaagggatataaagtaggagtattggatgcagatattacaggtccatctatgcctagattttttggagttaacaataaaagagctaaaataattccattagaaaatgatatggtaaaatttgagccagtggaaacagaaagcgggataaaaataatttccatgaatcttttaacagcagtagaagatgaacctgtaatctggagaggacctgtaattacaggggtgttaaagcagatgtttgtagaaactaattgggaagagcttgactatttacttatagatatgccaccaggtacaggagatattgctttaactgtaatgcaggaattccctattgatgaaattgtaatagtttctacaccacaagatatggtgtctatgatagtcaagaaagttgttattatggctcaaaagataggtgtaaagattaagggtgtagtagagaacatggcatatataaactgtccagattgtgataaaaagatacgagtatttagcagaaagtcatcagaagaaaatgcagattatcttggaattcctttaataggagagctaccaattaatattgaacttacagaagcattggagcaaggaaaagcagaggaatacgttaaggataatccgctatattcactgatatttgaaggattgtattaatagaaaacttcttttccttatactatatttatttcattattttaaattatattattaaatatacataacttaatatttcttgggaaataataaatttgtaatttgatattagaggagatgaagtaaaccatgaaaccaaaagtagataaagatacttgtatagcttgcggattatgtccatctatatgtccagagtgctttgacatgcaggatgatggaaaagcaggggctatagttgatgaagttccagaaggttgtgtagatgaggcaaaagaagcagaagaaagctgtccagtaaatgcaattgaaatagaagaataaaatttaattgcaaaatacaactaaaacgtctaaaataaataatttataaatattagttatttattatttgatcaaaaataggattaattttgttttataaaacaaaattaatcctatttttattctatatattttgcattaataagcttaaaacgcagataagtgaaatgtttaattactacgtagagcttctaaatataattgtatatataaattgtttatataatagttagtttgaaatagcatctactgatgatgcatgaaaaattctttctataggaagaacagctaaaattactaagcatatgattccttctattccaatcataggaccattaacaagtaaagaataaactactggagacactccttctggggcaaatgacccgaagaaaactatacctgaaataaggtgacataaaaatctgaccagtattgcaatacttaccccaactaatcttctttgtttgaagaatccggcaatacctaatgctgtaaagggcaatggataatcaaacaaaacttgaacaggatgtagtatatatggatccagtattaaggttattacaccataaagaaatcctgttaaacatccaacttcaggaccatatatgaatgctatgagtaatactggtatcatgctgcctaaagttatgctaccaccttgaggaaaatgatataatcttagcatttttaatatagtggctaacgctaatgctataccaattctagcaattagttctggcgtgaattttatcttttttgccttagctaatgctataagtagtagaatgcatcctaataaagttataatggacattggacttgcaagaatgtcctgaatgttttgtgagaaattctggaaaagtttagaaaattgttcgatccaatcattaaaaattgacataaaaaaaacctccttaattgtgctcggagattatcaaccaaataaatagtttaaagtttttaagaggttgcattccctacgctagaattaactagatcaggttttaagggtttatgaatatcaaatctcagcctctcggctcccctagcacattataaatatattacacttatactattttatacctattattatagatagtcaattagattgtatgtattaaatttgttattattacttaaattagaatgtgaatttgagctagaagtaatcaaatttatagagtgatgtgggattgtgttatttggtaatttatttgatgaaatggtgaatatatcatcatttctattaacaataatagcatctttgtatgttgagtctaatataaaatctttcataataacaaaacagtcctttcagtaaagatttctttgttattattatttacaagtagaaaagtaagtatacttgtaaaagattaaagagctaaataaaaaatatgaattttaatatttagccctttaattatgagtgaatagttaacatatatatttttcgattaatctaatctttcaactataaatccaacaagaccaggtccggtatgaacgccaagagcaggtcctattgatcctcctaaagtacattcaattagattaggaagatcttttatagaatcataaagcattttagatttctcaggtgcattcccatctaaaacccaaactttacatttatgattttctagataatttgttaatatatttgttaatttagatatacactgttttatgcctcttatcttacaaaccgtatggtatatgccgtcatcgccaacagtaataataggctttagattgagtacacccgctatagttccggcaactttaccaactcggcctccctttattaagtattctaatgtatctattgtaaaaaacacgtcaattttatctctaaatgaaggtaaggtcattactatttcatcaaaggatttcctttgctttattaggtttagagtttcaatgaccatagcgccctctgacatagttaaagtcatagaatcaaatacgaaagttttcacttcagggacattttcagatgcaagtcttgcagagttataagcgccagaaaggccacttgatattgttataataattgcatgtgtatatccttcattttttacctgttctaaagcagacgtaaaatcctcaacaccaggtaaggaagttttaggtatctccttaggcaaatattcatataaagtctttggtgttatatctattccatcaatatactctctatgagagaatataattttaaacgggactactttaatattattttctattacgaaatttgtattcaaatcagaagcactatcagttattaatgctattttatccatcttagttcctcctagaaatatatagtcttagtttaattataacactatttgtaaaaattacatttcttatagcttacttaaagaaataatttgtattataaattttagaaaataaattccattctttataaaattgtttggtttgcataacatgatagtttgaaataaattttaatcaattaagtttttagaacacagataataataattttcttatagtctattatgaaaaaatacttgaaatcatagtaaattacaacaataaagattatctacaataagtcaaatataaaaaagtcgtaaaaaatgaataaatcgaaagataataggatgtaaattaagataattaaaatctagtggtttaaaaataaaaaattagaagtattgctaatgaatacctaatacagtataatagtacggtagtaaaaatactatatattgtgccatggagggaataataatgctatatgttgtgaaacgcgatggaagagaagttgaatttaattcagataagatagctcaagcaattaaaggatcagctagtgaaatcggtttaaatttaaaagaaagtcaagttctagataccgtacataaggtgattacttatatagaagcagagtataaaaagactataactgtagaacaaatacaaaattttgtagagaaggcattaagagatgagggacacaaagatatagcagtcgcttattcagcatacagacgtgaaagaactaaagtcagagatataaaatcagatttaatgaaagctataagacaaattggagttgaaactgatagagataatgcaaatgtaggaaataacttcagctctaagttattaagaatagcatctgaatcaaataagtggaatacactagctactatgccaaagaacttagcaaaggctcatgagaatggagacttatattatcatgacttagatagctataatttaactgtaaactgcttgcatataccaacaaaagagatattagaaaatggatttaatactggatatgggacaattaatgctcctaagagaattgaaactgctgctgaattatcatgcatattattacaatcaactcaaaatgatatgtttggtggtcaatctcatccagattttgataatgatatggctatatttgtagagccaactagagaagaaattagagaagaattattggaactaggtgtatcagacgaaaagctagaagctatggtagaaaagaaagtaagaaaaaaggtacaacaagcaatgcagggtgtagtttataaccttaatacaatgcattctagagcaggatctcaagtaccatttagttcaattaatattggtttacctacaagctcagatgcagcattagtatgcgaagtttttcttctagaatacgaaaaagggttaggtaaaggtgaacaaccaattttccctaatataatttttagagttaaatcaggcgttaatagagaaacgaatgatgaatacttctatttatataaactagcatgtagagtggctgcaaagagaatgaatccaacttttatgaatatcgatgcagattttaataaagaatattacgataaaggttatgttccagctacaatgggatgtagaacttatcttatgaaaaatataaatggtgaacctggttgtaaaggaagaggaaatatagcacctacaactcttaatcttccaagaataggcttgcaggctaaaaatgatataaataagttttttagtatattagatgcaagattagaattagcaaaagattctttaatgcatagatatgagattttaaaaaatctaagagttaaggatttaccttttgtcgcaggtcaaggacttatgaagggttcagaaggattaaaacctgatgattctatagagccaatattaaagcaaggaacttggggaataggattcataggtgttgctgaaaccttattagctttagttggaaagcaccatggtgaagatgaagaagcaaggaaattaggaataaagatcgttgaacatataagacaatactgtgatagacttacagaggaatataagctaaattggagctgttatgcgactccagcagaaggactttcgggtaagtttataaagcaagatcaaaagatatttggattgataaaaggagtaactgacaaggaatattacacaaatagttatcatgtacctgtttcgtacccaatatctattaaagataagattgacattgaagcaccataccataaactttgcaatggtgggcatataagttatattgaagtagatgacacaccagatgcagaaacaataatggatataataaattatgcatataagaatactaatatcagttatatgggtattaattttcatataaggtattgtagagaatgtggtacttatcttcaaaacaatgaaaacaagtgtcctaaatgtggtagccagaatattcaaggaatatcaagagttacaggatatttaagtttagatgaaagatttggtgctggaaagtatcatgaaagagaagatagaatatcacatactgagaaacatgggcatcactactaaaagtatattgatgatagatttataaattataatatagaaaaagaagatggatttattaatcttatcttctttttttatttaaaaatatatcaatatatatttgaaaatatttaattcatcagatgttatattggcttataaggcaatatgaaacaaataatattatgaggaatgagttatagaataaagaagttatatattaaggaagcaaaaaaacatattttctataagaattattaaaaaatagaggaataaaaagtaaactttaatatattaatgaaattaatagagaatataatgtaactatttggtatgaatactaaatatgttgggtaaatctgctaaagaaaatggactgttaatttatcaatgtattgcaacatcaaaaaaaaaacttgcaataattgagagaattttcattaaaaacaattaaaatttgaaaatacatgaaggagagcagctgtttcgttgcaaaaaaataaaataaatcttgtatagatttattaatatatgatattataaatatacagtaaaaatgttaatttattaaaaatatgctttaagtaataagaaaataatataaatggggggactaaaatggcacttagtaatttaaaaactaataaaaaagtttctatagtagatactactcttagagatggtgagcaaacagcaggggtggtttttgctaatgaagaaaaaatagtaatagcagaaatattaagtgacttaggtgttgatcagctagaagtagggattcctacgatgggtggggacgaaaagaaggctataaaagaaattgtaaaaagaaatttaaaacctagtattatggcatggaatagagctgtagtcagcgatatagaacaatcaatagattgtggagttgatgcagttgccatatcaatatcagtgtcagatatacacattcagcataaacttaaaacatctagagaatgggtattagaaagcatggttaaatctgtagaatttgcaaagaaaaatggtctttatgtatctgttaatggggaagatgcatctagagcagataaagactttttagttgaatatattaatgcagctaaacaagcaggtgcagatagatttagatattgcgatactgtaggaattatggagccatttaaaattagagatgatattaaatatatatatgataaaacaggctttgatatagaaatgcacactcatgatgactttggaatggcaacagctaatgcggtagcaggtattaagggtggagcatcgcatgttggagtaactgtaaatggtcttggagagagagcgggtaatgcagcattagaagaagttataatggcattaatgcttgtttacggatataatggtgatggaataaatacgcaaatgtttagagaagtatcacaatatgtatcaagagcatcaggtagagagcttccaatatggaaagcaattgttggaaccaatatgtttgcacatgaatcaggaatacatgcagatggagcaataaaagatcctaagaattatgaagcgtttgatccagatatagttggccttgaaaggcaaattgttataggaaagcattcaggaagagcttcaataataaataaatttagagaatataatagagaacttacagaggatgaagcaaaaggaatacttgaacttgtaagagctacgtcagttagattaaagagaactttatttgataaagaagtagttcaattatataaagagtatcatagacgattagaagaaagaaataagcaataataggggggcgtaaacgtgggagataatttagtttataagattttaaaaagccacattgttgaaggtgaattaaaggcaggagagcctatagcattaaagattgatcaaacgttgactcaagattcaacaggaacaatggcatatcttcaattagaagctatgggaatagatagagttaagacaaagaaatcagtagcatttatagatcataatatgttacaacaaggttttgaaaatgcagacgatcataagtttattcaaacagttgcatctaaatatggagtatatttttcaaagccagggaatggaatctgtcatcaaattttcttagaaagattttcaacaccaggagatacattaataggttctgatagtcataccccaacagctggtggggttggtatgcttgccatgggtgcaggtggattagatgttgctcttgctatgggaggtggagcgtacaatattaacactccaaaagttgtaaagattgaactaactggaaaattaaatagaatggttgctgcaaaagatgttattcttgaagtcctaagagaattaacagttaaaggcggcgttggtaaggtatttgaatatgccggtgaaggtgttaagacactctcagttccagaaagagctactataactaacatgggagcagaacttggcgctacgacttctatttttccaagtgatgaaagaacattagaattctttaaagcacaaggaagagaagaagactttatagaatttaagccagatgaagatgcggtatatgatgaagtagtaacaattaatttaagtgaattgacaccacttacagctaagcctcatagcccagataatgttgctaaggttagtgaagttggtaagattaaagttgaccaagtatttataggaagctgtactaactcttcttatgaagatttaatgaaagttgcaaagatattaaagggaaataaagtacatccagatgttagtttggtaattggaccagggtcaagacaagttatggagatgatagctagaaatggagctctagcagatataattagttcaggagcaagaatacttgaaaatggttgcggaccatgtatcggtatgggtcaatcaccaggaactgatgcaatttcgcttagaactgtaaatagaaacttctttggtagaagtggaacattatcagcacaaatatatatagtaagtcctgaaactgctgcagtttcggctataaatggatttttaactgatccaacagaagtagatgtagatttaacaatagatatgcctaaggaattcttaatagatgattcaatgattttagcaccggcaccaacaaatgctgaagttgaagttgttagaggaccaaacattaagccattcccagtaagtaagccgttagctgaagaattagatggtaaagtactaataaaggttgaagataatattacaactgaccatattatgccttcgaattctaagttattgccatttagatcaaacataccttatcttgcagaatattgcttcaacacagttgatgcagaattccctaagagagctaaggagtttaatggtggatttataattgctggaggaaattacggacaaggctcaagtagagaacatgcagcattggcgccattatacttaggagttaaggctgttatagctaaatcatttgcaagaattcataaagcaaacttaattaataatggaatagttcctatggagtttaagaatgaagctgattatgacaagattgagttaactgatgatttgaagatggaagacattcaagcagctttagaatcaggaatagttaaagttaagaacttaactaaaggaattgaatttgacgctacagttgatttaacagagaaagaaattgctgttattaaagaaggcggaagacttaattacgttaaagcaaatagttaattataagataaagagtgaaaatgcagggtctttaagactctgcatttttttatacaaataggcatgtaaatgcttaaggattataattcaaatttaagatgggtgtaatatgcaggtgatttgtaaatgtgattatacttacgttataattaattatctaatagaatgtatataaatagattgatgagaaagaagtgtaagtttgatggaaaagactataagattagcaggaatagcatatgagagtttagttaacgggcctggtataaggagagtatttttttcacaaggttgtaaacataactgtaaaagttgttttaatcctgatactcatgatttttatggcggagaacaaagagatatagatgaattaattagtgatacaataaataatgaaattataaagggagtaacatttagtggcggagatccgtgggaacaggcagataaatttgcatatatggcaaaggagtttagaaaaaaaggcttaaatatttggagctatacaggatatacatatgaatatattttagaaaataaggattctatattaggctggagcgatttattaaacaatattgatgttcttgtagatggaaggttcgaagaaactaagatgctagatggacttaagtttagaggttcaactaatcaaagaataatagatgttaaagaaagtataaaaaaagataaaattgttattatagaattttagtattaatataagatgtttttgaaagtatccacaaatatgtgagtataattagaaaagctgtggattattatttgaactatgtggataaattttggagtaataaaataggcgtatatatcacaacataagttatattacttatagtgaaagttaggtgaattgagcttgattttaaataaagaattttataaacaaggtgcattaattttagcgaaagaacttttgggaaaagttattacaagaaagattgatggagtgaccttaagagctaaaattgttgaaacagaagcgtacataggagaaatagataaggcatcgcatgcttataatggaagaaggactgaaagaactgaacctttatttagagaaggtgggattgcttatgtttattttatttatggaaaatactattgttttaatgttataagtggattagaagataagggagagggagttctaataagagcgttggaaccgttaaatgaatttgattatcttgcaaaaaaaaggtttaatcaaaattatgatgaactttcagaaacaaagaaaaaggcaattacaaatggaccgtcaaaactgtgcattgcattttcaatagataaatcagaaaattataaaaagttatatgaggaaggtgacttttatatagaagaaggagaaaaagatacgtttaaaatagtagaaacgaaaagaatcggaatagattatgcagaagaagcaatagattttccatggagattttatatagagggaaataaatacatatcgaaaaagtagcaaacttttaatgtaattcctattgagcatttaatttaaatacaaatatttactaaagagagataaagagtaatatatttaatacgataaatctatcatgagacatttttttataggagatagatttatgattactagagtaattaatagaaattttagtacgtataaatataaaaggagaaaagcatctttaaaaataaaagttactaaagaaaatattatatcgtttagtgaaatactcgagaatgtacaaatgcttaggaaaaaaggaattatatcagtatcagatcttaatagaaatatatctaagtctataaaaaaatagtaatataaagatgacagtacatggattaattaaggcatgtattgtcatctttgtattactcattttctttatcagcattgattaatttatctgaaatgataaatctaggtctgtgtttagcttcattatatattttcccgatatattctcctattacgccaagagataagagctgaactccgccaagcacccaaatggaaagggttaatgaagtccaaccagtaactgtacggcctaaaattttaactataagagtataaagtagggctgcacctccagcaaaaaatatagtaaaaccaaggagggttattaatcttattggttttatgctaaaggatgtaattccgtccaaggcaaaggctatcatcttttttagaggatatttagattcaccagcaaatctttcatgacgttcatattcaacaactgaatatttatatcctattaatggaatcattccacgaagaaataaattaacttccttatattgacttagcccgtctacaacacgtttgctcataagtctataatctgcatgattatagaccatgtctacgcccagaatacgcattaatttataaaaacctaatgcagttgttctcttgaaaaaggtatcagtttctctagtggatcttactccataaacaatatcgcatccatcataatatttttctacaaatgcatctatgacatctatatcatcttgtaaatctgcatctaatgatatagtcatatctgaataatctttagcaaccatgagcccagcaagtaaggcattctggtggcccctgttccttgaaagattgattcctgaaaatatattatttttagaatgaagctcttcaattatgctccaagttctatcttttgaaccatcattaacaaaaagtattttgcttttattagatattaagttatttgaaatcatagttttaatttttactagcaatcttttactagtttcatgtaaaacttcttcttcattgtagcaaggaattacaagatatagtatatccttcataaaatcgcctccaatgattagtataaccaaataaattaacaatattattcaattgtagttttaatattcattattttataattcatatcttatatttgatataactacagaggtttcgcttattaaattaatttcagtattaaccctatctggtctagaacttttaagaatttttacaataggtcttagtgggaagttaggtatagtttcttgtacaacagctatgtcaccattacttagatcaactaaagttccttttgagaaaggaattacaattttgcagaatatattaacaatttcatagtcaaattttttacctgcattagacattaaatattcaagaacatcacttggaaacattgctcttttattaggtctaccggttgataaagagtcatatgcgttagcaatgcttacaattttacttaaggtatttatctcatcattagctagcttattaggataacctaatccatcaggtctttcatgatgctgtagtgttattattttgctattagcgctcagattataagagtctgataaatatttatatccgagtattggatgttggtctaatatcgtaacttcttcatccgttagttcttcttctttcataagaatttcttttggaataaatgttttcccaacatcatgaagcaaagctccaatacaaagatattgaagttgtctttttggaagcttcagtgcaattccaaggactagcgatattacagcaacattcacagaatgagagtagatataattatccatgcttcttatgtctattagtgaaagtaagacacttttattatttagaacattttcaattaaatcttcagccatagactcaatattattgaaatatactgattccttttttgaaaacttatcagcaacagtaagtctatttatatttgaaaaagcttcttttattgttagaattgctttttgtcttaattcaggtttaataatatcttcaatttcatcagaactaaattcatcaattatatatattgataaaatatttaaatcctttatcttaaaaataattctttcactaaggaccataccagcccttactaatactctaccatcagaatcatataatgtcttaccaataactgtattcggttttacacattcaattggaattaatctcatattatcttctcctcaaatgttggttatagtacaatttacaacataattcttagttaaatgttaaacataatagtagtatatcagtaaaattggcgtatttatagtattatgatgaaaaaatatattattttgtttaacatatttaaaaaatagaactaactactagttagaaagtctgataattagatttttatacaacatatttaatataggatactaagctcataattgataataaattaagtattttagcagatttgagtatatataagtccattaactttttatattaataaatgataattttgttacttgatatttaaattgtgttataatattatagattacaaataaaaatatcaaagggggctttttcaatgtcaagagtttataatttttcagcaggaccagctgtattaccagagtcagtcctaagagaagcagcgggggaaatgctagactacaaggggacaggcatgtcagttatggagatgagtcatcgttctaaagcgttcgaagaaatcatcacagatgctgaaaagacattaagagaattaatgaatattccggataactataaggtattattccttcaaggtggggcatcacaacaatttgcaatgattccaatgaatctaatgaaaaatagagttgtagatcatattattacagggcaatgggcaaaaaaagcagcgtcagaagcaaaaatatttggaaaggttaatatattagcgtcttcagaagataaaactttttcatatataccagatttaaaggatttaaaagtttcagatgatgcagactatgtttacatatgtcataacaatacaatctatggaactacgtataaagaattaccaaacgttggggataagatattagtagcagatatgtcatcggatttcttatcagagccagtagatgtatcaaaatacggactaatatttgcaggagtacaaaaaaatgcaggaccagctggtgttgttgtagtaataattcgtgaagatttaatcacagaagatgtattaccagggactccaacaatgttaagatataaggttcatgcagacaataaatcactatataacacaccaccagcatatggaatatatatatgcggaaaagtatttaaatgggttaaaaacaagggtggactagaagctatgaagaaaattaatgaagaaaaagcttctattctatatgattttcttgattcaagcagtatgtttaaaggaactgttgtaaagaaagatcgttctttaatgaatgtaccatttgtaacaggttcagatgaactagatgctaaatttgtaaaagaagctaaagcagcaggatttgaaaacctaaaaggacatagaacagttggtgggatgagagcaagtatatataatgctatgccaattgaaggtgttaaagatttagtagaattcatgagaaagttcgaagaagataataagtaatagaataaaaataaattaaatttaaggagataatcaggttttggttatctccttaattaattttataaataaaattatactaatagctgaatttataatatgtattatgtatagataatcaatacaatatatacaattttaaatgttattagtacatgtaatatttttataagctaatattagattaattgccatataaaagacatatataagaatattcaggtgtagattacagatgaaataaattgcagataaatctatagaggtgtaatagccatataaagatattcaaacagaatacaaggtagaaaaatttaatatagatatagtttggattagttcataaatcctaatttgctaactaacttgatagaattttaaaggcaaagttactattgcaatatatatattaaattaatcatgatataatatcaaaaaaggagctatcgaattaatcgatatacccctctttattaataatataaaattaacagttaattaattagaactcgcttgttccaggagttctagggaatggaactacgtctctaatgttagtcattcctgttatatacataattaatctttcgaagcctaaaccaaaaccagcgtgtttagtttctccatattttcttaattctaaataccaccagtaatcatcttcggataggtttaattcagtcattctatcttttagaacatctagtctttcttctctttggctaccacctataatttctccgattcctggtaccaaaagatcagtagctgctactgtttttccatcttcatttaatctcatataaaaagctttaatgtctttaggatagtctgttacaaatagtggctttttaaagtgttcttcagtaagatatctttcgtgttctgtttgtaaatcaataccccatgatacatcgtaatcaaatttctttccacacttttgtagtatttcaacagcttctgtatacgtaactttagcaaaatctgatgaaactacgtgatttaatctttctaataaacctttatcaacaaattgattaaagaattctaattcttcaggacattcatccataacatatttaataacatacttaagcatattttcagcaagttccatatcatcttgtaaatctgcaaatgcaatttcaggttcaatcatccaaaattcagcagcatgtcttgtagtatttgaattttcagctctgaatgttggtccaaatgtatagatatttctaaacgctaaagcaaagcattcagcatttaactgaccagatacagtaagattagtctctttgccaaagaaatccttgctgaaatctacacttccatctttgcttaattcaggagttttaggatcaagtgttgttaccctaaacatttctccagcaccttcacaatcgctgccagttattattggtgtatgagtatacacgaaattttgatcttgaaagaacttatgtatcgcgtaagcagcaacagagcgaactctaaaagttgcagcaaatgcattacttctaggtcttaaatgagctattgttcttaagtattcaaaggtgtgtctctttttttgaagtggataatcagagtttgacataccttcgataataatattcttagcctgaatttcaaaaggttgttttgcttcaggagtagcaactaaggtaccgataactgaaattgaagaacttataggtaatttagatatttctttgaagttatttaacttatcgtcaaaaactacttgaatatttttaaagaaagaaccatcattaacttctataaatccaaaagcgttagatgatcttaaagttcttatccaacctgatattgttatttcctttgataagaaatcatcagtatttctgtaaagacttctaattaaaattgattttgccatattgcatgacctccattttataattaatcttgtgatcaaaacatattattaatgaaaaaaatttttcactattttaaaatatcatttatgtaacctattacccttgataataaatagattttacaatacttttttggtgaatgcaacttaggacctgtccctaaacatataataaatcagtgctttagatcgcctgagtataaataatacatgaaataaatatataaattatagatatatgtaatttataataaaaaagctttattttttatagtaaaattataaaaaataaagctttttttatattaagagtatttatttaacatgcttgtctattccaagccattttcaaaactctgaatcaattcttttggaaagtttaacattgtcatatctttaactattcttttataggcgtagggaatttcttttatctgaactttcattccatcttccttactgatatttagaatacaataagtgctatttggtctaccaatcttaggctttccaacactaccagagtttatatataccttatttttaaagtccttcattccaggtatatgcgtatgtgcacaaattaatacatcgttagaaatagagttcataacttctgaagtattatctccatcctttaatagatattcatctattttatctggacttccatgaacaaataagagacttttattagcaatattcaaagttaaagttgaaggtaaattagcaagaaatagtctgttttcttctcttaattctttaacggtccaaggaagagaaaaagcattaataggagtctctcttatatatgaatattcattattaactacagaactatcataatttcctcttatgcaaagaatatgacgtcttctgatcatggaaattacttcgttagggtgaggaccataaccaaccaaatctcctaggcaaataattgtatcaactttctcaatatcaatatcttctaaaagattaataagagcatagacattagcatgaatatctgaaattattgctattttcatgagcattcctcctaagttatttagcaaattaagtatttaggcttttaagtatttttccccaacaataactacatcaccagcacctactgttaatagcaagtcaccagaaactagttttgattttacgtaattaagtgcttcatcatgtgagtgaacattggtacatttcaatcctttatttcttaatgcatcaccaagttcgtcagaagatactagtccagtatttttctctctagctgcatagatgtccattagtataagttcatctgcatcattgaaacattctgtaaattcatcaaatagggcctttgttctagtatatgtgtgaggttgaaaaatacaataagtcttattatgattcatttgtctagcagtacttaatgtggctttaatctctgtagggtgatgagcgtagtcatctataacagttacaccatttaattctcccttatattcgaatcttttatgcgctcctttgcagtttgataatccttcaataatacagtcattagaaatattaaatataagagaaacacaaattgaagcaagggcattcaatatattatgcttacctggcacatttaaagtaatattgaataagtttttaccgtccttatacacatcaaaagtggcacagccatttgtattgaaatgaatatttttagcagttaaattagcattgtcactaaatccataacttagagtattacaatttgtcttagacagaatttcatttaccctttgatcgtcagcatatccaacaagataaccatcttctgggataagtcttgagaattgtaaaaatgtatcagcaatttcatctatatctttatagtaatcaagatgatcagaatcaatatttagaattattccaacataaggtgggaattttaaaaatgaacgtttatattcacaagcttcagttaagaaatattcactattaccaatcctgaaatttcctccaattgcatctaattcaccaccaactaagatagttggatctaaattatcagcaagtgttatatgagaaagcatggatgtacatgtagtctttccatgggttccagatattgcaacactgtatttgtggcccttcataatttgccctaaaaattcagctctgtccattaatgcaatatttttttccttggcttctaaaagttcaggattatcagatgggattgcagcggtatagactactaaatctacattgttaatattctctcttctatgacctatgtaaatttcagcacctgaagatcttaatttatcaatgattgcagaatccttaaagtcagagccagatacactataaccactatttaataaaacagcagcaagtccgctcatactaattccaccaatgccaatgaaatgaatttttttatctttatcttttataaaattgaaagacaaatgatcaactcctttttaattaataaaactaaatgttattataagttccaaaatttgagtatagaatttttagttttatactttaactataattatatacatttttcaaaaaatcaaccatagtaaaaaataaatacacaatattttatgcatatttagcgagtttgtgaacaagttataaatataaattaactttataactaaaaatattgatattaacttgaaattagcataaaatatgaatattaaagcgatttaatataaaaaaattcgtgtgggtgattttatggagaagtttacaagaaataatagggtagttgccataacaaaaatattattagaaaacccaaataaaatattgggattaaataaattttcagaattactaaatgcggctaaatctactataagtgaagatattgttgttgttagagaaattctagaaagacttgaaatgggtaaagttgaaacaattgcaggagtagcaggggggataaaatatattcctcaaagtggcgaagaagagaagaaagcttttgcattagaactatgtcagcaattaagtgatgatggaagagttataccaggaaatataatatatatgacggatctaatgtatgatcctaagataataaataaagcaggagttatgctttcatcatgttttcaaggaaaagagattgattatgtaataacagtagagactaaaggtattcctttagcttatgaggttgctagaaatttaggagtacaattagttattgctagaagagatagtcaagtaacggaagggccaacagttactataaattatgtgtcgggaagcaatggaaggttgcaacaaatgtcactatcaaaaaaatccatgaaaccatcaagtagatgtatatttatcgatgatttcatgaagggtggaggaactgcaataggtattaaggacttattgaaagagtttgatagcgagctagtaggaataggtgtattagtcgataataaacaaattgaaaaaaaattagtagacgaatatgtttccattgtagagttaaaagctgttgataaatcagcaattataggaatacaaccttcaaaaacattttcttaaaattaacagaaaattttactctaaagatgatgcgtaattccaaatgcttttaatttagcatacatataaataaatattaaatttgtagctagtaccaacaaaaaacatgaatttcattgcgaatatttattgttgcttcaagttgtcgtgaatagaaattgttctgaaattcaaataggacaatctcagaaatttagtatttgtataagattacacaaaaaaataaattttataaggatttatcaaatataaaaaaggaatttagaaatttgtggagaaattatataatattaaatatttttaaggcaactgggaggggtggagtaaaatgcaaataacagatgttagaattagaaaaattgcatcagaaggtaaaatgaaaggaatagtttctgtcacatttgataatgaatttgtagttcatgatatcaaagttatagaaggacaaatgggtttatttattgctatgcctagtagaaaaacaccagatggagaatttaaggatatagctcacccaataaatacagaagcaagagaaaaaatacaaactgcaattttagaagcttatgaaaaagcagtttcagaagaagttgtagaaggctaggtttttaacaaaaggaagttttaatgacttccttttgttttgtcataaagtatttctatagccaaatattaaatgtactaatgggttgaaataagagtagctttccaatataattaaattgatatgaatatttaaccgattattgcaagtaaataatcgtgttaatataaatttataaatgaggtgtggtatataatgtataaatgtgcactggttttagcagcgggtcaaggtaaaagaataaaatctgatttacctaaagtattgcataaggtatgtggtaaagaaatgctaaaacatgttatagattcgataagaaaatcaggaattgatgatatagatgtaattatagggaaaggtgctgagcttgttaaagagagaacattagatagaaatgttagttattcaatgcaagctgagcaattaggaactggccatgctgttaagtgcgctgaagagttcttaaagaataagaaaggagtagtcgcaatttttactggtgatactcctttaataaagcaatcaacaatcgaaaggttatttaatgaacatatagaagcaaaaaattcagcaactatattaacagcaatagttaatgatcctacaggttatggaagaatcgtaagaacgaatgatggcgtatcaaaaattgtagagcataaagattgcaatgaagaagagcttaagataaacgagatgaattcaggaatatattgttttgatattgagctacttgtagatgcattaaataagataacaaataataatggacaaggtgaatattatcttacagatgttataggaatattaaaatctcaaggtaaaaaaataggtgcagtcgtaactgaatatgaggaaactatcggagtaaattcaagagttcagttagcagaagcagaagaaatacttaagaatagaataaatcttatgcatatggaaaatggagttactctaattgatcctagaacaacatatatagggattgatgttgaaataggtaaagatacaataatatatcctaataatattttagagggaaatacaaagataggtaataactgcttaatttatcaaaattcaagaattgttgatagtaatattggtaatgaggtagatgttcaagcttcagttatattaaatagtaatattggtgataatactactgttggtccatttgcgtatataagaccagaaaccacaattggtaagcatgcgagaataggagattttgtagaaataaagaaatctactattggagatggaactaaggtttctcacttaacttatataggagatgcagaagtgggatcggaatgtaatttcggatgtggtacagtagttgtaaattatgatggtaagaataaacataagactattataggagatcatagctttataggctgtaataccaatttggtatcacctgtcacaattcacgataatacttatattgcggcgggatcgaccattacatctgaagtaaaagagggtgatcttgcggttgcaagagctaagcaaagaaatatcagtggatgggtagataaaaaaggattaaaaaaataattttttaataataaatcagccaaaattttaaggaggtcttctcaattatgataactcatggaagaaatataaaagtatttactggaaattcgcactcacagttagctcaagatatagcagatattttaggagttccagtaggaaagtctaaggtttcaacttttagcgatggtgaaatatctgttgatattaatgaaactgttagagggaatgatgtgttcatagttcaatctacatcttcacctgttaataacaatctaatggaattgctaattatgattgatgcatttaaaagagcatcagcaggtagaattacagcggttattccatactacggatatgctagacaggataggaaggttaaatcaagagaccctataactgcaaaactggttgcagatttattgactgcagcgggagcaaacagggttttaactatggatttacatgcatctcagattcaaggatactttaatattccagtagatcatttacttggggcaccaatacttgctgagcattatatatcaaaaggattagtagatcaagatgatgttgttgtagtttcaccagatttaggaagtgtaactagggcaagaaaatttgcggataacttacatgctccaatagcaatcatagataagagaaggccaaaggcaaatgtttcagaaataatgaatattattggtgatattgaaggaaaaagatgtatattaattgatgatatgatagatacagcaggaactattgcaaatgcagcgaatgcacttaaggatttaggggctaagaatgtttatgcttgctgtacacatggagtattgtctggccctgcaatggacagaataaatgcttcagcaattgaagaattagtactattaaatacaattccgttaaaagaaggcaacgataatagcaaaattagatctatatcagtagctcctttatttgcagaagcaataaagagaatttatgatgatcaaccaataagtaagttatttgaatgtcaacaatagataataatttagagagtttttaagtaaataagatgttgaaaggaatgtatatttactctaagtaattagggtaaatatatattctattttttatagttaaataaatttattttattaagtcaatgttaagagtgtaaacgagaaaagttttatgatttaattaaaatagaatctattaaataattattatacttatatatttctagaatatttattataattaaaggataattttgttttctataataaatagtatatttatgttatattaggatatgaatgcttatgcaatagtaataaattaaggaggaaagtagagtggatggagttacaaccaaggttctgattgtggacgacgatgaaaacattagtgaagtgatagacatgtatttaaaaagttctggatataatacaaagatagctttgaatggtaaagaggctcaagaattttatttagaatataatccggatattgtcttacttgatgttatgataccttatatagatggaattgatattctaaaatggatacgaaaacagaaggaaactccagttataatgattacagcaaaaggggatacctttgataaggttttagcactagaaattggtgcagatgattatatagtaaaaccttttgaacctaaagaattgttagccagagtaaaagctgtattaagaagatattcttcagagaatattaaaaatgaagtaataaaattaagtgatctatcaatagattcaacttcgtataaagttatatataatgaagaagaaataaaaatgccaccaaaggaatttgaactattatattatttggctaataataaaaataaggtttttacgagagaacaattactttgtgaagtatggggatatgattatccaggagattctagaactgtagatgttcatataaagagattaagagaaaaattaagtagtggagaacagtgggaaatccaaacagtatggggtgttggttataaatttgaggtaaattaaatgaaaaagagtggaagcttacttcaaaaacttataataacatttatagttattttgacgattgttttagtttcattagcttggttattatctatatggtttagaataacatattttactgaaaagaaagtgcagtttcagagagatggagagcatatatccgaagctataaaagcatacaattccaacaaaaattcattggaatatgataaattacaggctgtagtggatatgtcaagtgttggagcaaatgctgatattactgtttctgataagttcgataatatatatatatactctaaagcgtcaagtgttaaggagatagacaataaaccagagaatctagataatagtaaagagtcattacttaatggaaagccagtagagtatattggagatcgttacacctatatatatccaatattgaaagatgatgaatttcaaggatatattgtcatgacagctcctttatcaacaataggtaaacagttgaatagaatatatcttattgtgtggatatcagcattaggggcaatggtatttgcatctgtagttttatcattagtttcaaagaaaatattgattaatcctttagctgaaataaacaaggcggccaaaaggtttgctaatggagaagttaataaaagagttcatatagaatcgtgtgatgagattggtgagctggcaagttcatttaatataatggcggagtccttggaaaaagttgagaataatagaagagatttcatatcaaatgtttctcatgagttgagatcaccaataacttctataaagggatttattgccggaataatagatggagtgattccaaaggataaagaaggatattatttagacatagtatatagtgagataaaaaggcttacaagattaattaatgatttactggatttatcagctattgaatcaggtaaattaaaattcaatatgagaaagatcgatataaatgagctaattagattatgtgttataaataatgaacaaaagataagagaaaagcaaataatgttaaaaatagatttgaaagaccagaattgttatgtaaaagctgatgaagataagacaatgcaagtcataactaatttattagataatgcaataaaatactgcggaaataatggaattataagaattagtacatattccaagggttctaaagtatttgttgagatatataataatggacctaaaattgcagatgaagaaataaggcatatatggaatagattttataaatcagataagtctagaacaaacaaagttagtactggactcggattgccaatagtaagaatgataattatgcaacaaggtgaggaagtatgggtcaagaatcatcctaatataggagtcacatttacattttcgcttacaaaatataaaaataataagattagataagggcgctaaggaggaaacaagtatgtttttaatagtaggtcttggaaacccagggaatgagtatgagaatacaagacataatattggttttaaagttattgataatattgcaaaagagtataatattgaaataaacaggcaaaaatttaaaggtatgtatggagaaggttttataaatggaaaaaaggttatgcttttaaagccaactacttacatgaacttaagtggtgaaagtgtaagagaagtagttgatttttataatcttaacaacgatgagatactagttatatatgatgatataagtctagaagttggaaagttaagaataagagaaaaaggaagtgctggagggcataatggaataaagagcataatagcgcatttaaatagtgaaattttctcaaggataaaagtaggggtaggacaacctaatggagatttagtaaaacatgtattaggtaaatttacaaaagaagaaactgctattctaagcgaaagtatagaagcgtctacaaaggcagcagcagaaataattaaaaatgatgttaagacagctatgaatcagttcaatggattcaaggcgagtacaacagtttaaggaaggtgcatgggatgagattaaaagggttattggagcccttggaaagtagtttggaatttcaaaacataatacaaggtattgaaagtaaaagataccctattggtatatatggtgcatctgaatcaggtcgaggatacattataagtggaatatttgaaaatactaacagatcaattgtggttgtaactcaaagcgatatggaagcaaaaaatctttatgaagatttaatattttatactaatgaggtatattattttccagtaaaggaaatggttttctataatattgatgctatttctggagatttgagatgggcaagattaaaagtaataaatgaaatattaaataataagaaaaaaataatagtgacatcaatagaagcttttgcggcaaaatatactcctcgtaatttatttttagaatatagcatgaaatttaaagaaggcgatgaagttaatcttgccgatatatcaaataaattaattcaatcaggttatgaaagagtggaaatggttgagggcaaaggacaattttcacttagaggaggcatattagacgtatttccaacaggttcaacttatccatatagagttgaactttttggcgatgaaatagaatctataagaacttttaatacagaatctcaacgaagtattgagaaagttaaaaagatagatattttccctgcaaaagaagtaatagtttcagaagagatgttagaggttggaagaaataaacttaaagaagagtttaataaaattgctgaaagtgataaagatagcgaaagagtagaaaaactaagaaaaatattaaataaaaacttagaactattagaagaaacttcatcttttgaaacaatagatagttatcttccttattttacaaaggaaacagaaagtcttttcgattattttaagaattatttctttatagtggataatgttcaaagatgtaagggaaaattagaatcaacttatttagagtttgaagaaaacttcaccgctttttctcaaagaggagatatatttcccgggcaaggaaatttattaattaataaagaagaggtattagaatcatttgaagatgaaaaaattgcttttatcgaagcattgacaaaagtttctggctggctaaagccactatcaataataaatgtagctcaaacaacattaaataactatcaaggtcagctagatttattaattgacgaaatattagggaaaaagaatttaggatataagacactaattttatcaggaactcgggctagaggggaacgtttagttggaacattaagagatagaggtatagaaagtgtctataaggatacagttgataaaattgagtatggtgaagttgcaataacttttggtaatcagttgaaggggttcgaatatccccaatataaagtatgtataatatcagataaagaagtatttggtgcggcaaagagaaaattaaaaagtagtaaagcaaagaaaaagggaatttctaaaatcaagagctttgcagaattaaaaccaggagattacgtagtacatgcaaatcatggtatcggagtatacaaaggaattaagcaaatagatgttggaggccataaaagagattatttagatattgtttatgataaaggcgataaattatatgttccagtagatcaattagatttaattcaaaaatatgttggaagtgaagggaagtcacctaaagtcaataaacttggaagctctgaatggcaaaaagcaaaggcaaaggcaagaaaatcgataaatgaaatagctgaagatttagttaagctttatgcaatgagaagtactgtaaagggacataagttttctaaggatactgaatggcaaaaacaatttgaagatgagtttccgtttgaagaaactccagaccaattaacctcactggaagaaataaagacagatatggaatctgataaacctatggatagacttttatgtggagatgttggatatggcaaaacagaagttgccataagagccgcgtttaaagctgtaatggatggaaaacaagttgcccttttagttccaactactattttagcagagcaacattataaaaatataaaaaatagattttcagattttccgataaagatagatatggttagtaggtttaggacagcaaaacaacagaaggaaatacttcaaaaggtgaaggaaggtaatttagatattttaataggtacccatagattagtatctaaagacattcaatttaaagatctaggtttattaatagtagacgaagagcaaagatttggagttaaacaaaaagaaaaaattaaagggattaagaaaaatgttgatgttttaactctaagtgcaactccaattcctagaacccttcatatgtcactaagcggggttagagatatttcggttatagaaacaccgccggaagaaaggtatcctgttcaaacatatgttgttgagcagaatgatcagctcataagagatgcaattcttagggagataggtagaggcggccaagtttactttgtatacaatagagtggaagatatcgaaaggatggctaagtatgttcaagcgctagttccagagagtaaggttggaattgctcatggtcaaatggcagaaagacaacttgagaaggaaatgtttgactttatgtcagaagagtataacgtattagtctgcactactataatagaaactggaatggatattcaaaatgtaaatactataataatatatgatgcagataagatgggactttctcagttatatcagcttagaggtagagttgggagatcaaatagaattgcatatgcgtatttgctgtatactaaggataaagtgttaacagaagttgctgaaaaaaggcttaaggcattaaaggatttcactgaattgggctctggttttaaaatagctatgagagatttggaaattagaggtgcaggtaatatgatgggatcttctcaacatggacatatggcctctataggatatgatctgtattgcagaatgcttgaagatactgttaaacttcttaaaggtgaaattcaaaaagaacctatagaaacaaccttagatataaaggtagatgcatttatatcagaaaattatatagaagatgaaattcaaaaaattgaagtttataagaaaattgctgcaattgagggattagacgattatagtgatatcaaagaagaactagaagatagatactctaagataccagaacctgtatataatttaatggatattgcttatataaagagtagagctaagtctatattcattgaagagataaaagaaaccccaaaagaattattgttcaagtttgcacaaggtgaaagtgaatataaaaatatatttaaaatattgatggaaaaatataagaatagcgtagtattaaagtttggttcaaacccttatttcgcatttaaattaaaatatattaagaaggaaaataaattggagtttctgaaggaagttttcgatgacataatattgtaacaaatctatgatataaaagaaaagtagaagaaataaaatagtgtaaaaaatttgaattataaaagcaatattgatatactaatgttatgaatttttacagtaagaaacctaaaagaataatattgtccgacaaaaattaatttagcttttcaaatttcgttttataattctagcaagttttgtttaagtagaatttgaaaagtgattttagtttgtctaaattatatatatttatgtggaaagttatttttaatgggtttaaatctagaataagcgaggggaaaactttgaaaaaattaaaaaaatttgttgcagctgtagctatggtgacaattgcggtatcagctatgggttgcaaaatgattgagaaaacaccagaagcgatacagaaaacagttcttgcaacagttggaaatgaaaaaataacaaaaggtgatttagataaagaaatggggaaatatactgagcagttaaaacagaagtatggagataattatgaaagtaatgctcaagttaaagagcaattgcaacaagcaaaaaaacaggaattagacaacttagtaactcaaaaagtagttttacaaaaggctactgagttaaatcttaagccatctgatgatgatataaacaaacaagttgatgatcagataactcaaattaaatctcaatattcagaagaaggacaatttgaaagtgttttagagcaaaatggattgactgaagatcagctaaaagatgctataaaaaataatgttataatgcaggctgttcaacaagatatagtgaaagatatagaagttactgatgacgatgttcaaacatattataatgaaaataaagattcaaaatatacacaaggagctggagcgaatgcatcacatattctaatagctgaaaaggctagtgatggatcaatagattatgatgcatcattaacaaaagctaacgctataaaagcaaaattggattctggagctgattttgcgaaattagctaaggagaactcaacagattcaggaactaaagataatggtggtagtttaggatttgtagcatataactcaacacaattagttactgaatttatggatggatttaagaatttgaaagaaggagaaatttcatcgccagtaaagagtcagttcggatatcatataattaaggctactggattaaaagactcacaagtaactccttttgaacaagttaaagatcaaataaaatcatcattattacaacaaaagcaacaagatgctttaagtgctaagattacagaatggaaaacagacctaaaagtaaaaacttatgaagagaaattataataccaaaatagagttaggtatctactaataatttagctaattaataatgaaagttaggactactttgaaatatctctgattattcaaagtagtcctatttttgtttctactatatgaatcacattgaaataacagcatttatattaacaaaaaaataattaatataaaatttgtctataagtgtataaaatttctagaaattcaaataataatagtgcaaccaattaatagagttcaaaggaggttatataaccaatgaaggcaacaggaattgttagaagaattgatgatttaggaagagtagtaataccaaaggaaataaggagaactttaagaataagagaaggagatcctttagaaatttttaccgatagagatggtggagtaattttaaaaaaatattcgccaattgaagaacttactaacttttcaaaggaatattgtgaaagcttgcaacaagttataggtcatgtagtactaatagctgataaagatgcatttgtttcagtaagtggagcaccaaaaaaagactacatagaaagaaaagtaagcagtgagctagaaaagataatggacggaagaaaaactgtattattaaataaagctgataacgcagtaataccattacataatgatgacgatgaaacagagtatactagtcaagttatatcaccaatcatagctgaaggtgatgaaataggagctgtaattattctttcaaaagaagatggagagcttggtgaagttgaaacaaaactagttgagacagcagcagcattcttaggcaaacaaatggagcaataatacttataaataaccacattatgaaaataaaaggaataatacctccaaacttacaataataattaattagtaacatgtaagtttggaggtgttttatgaaaaaacaatccctaataagagggagcataattcttggagttgcaggaatattaacaagatttttaggtctattttttagatggccactaataatgttaattggagatgagggaattggatattatcaaatgtcatacccgctgtatatgttttttatagctatggcttctggagttccagttgcaatttctaagatgatatcagaaaagaatgcaacaaatgatatatatggaagctttgaagtaatgaaagaatctgctattttaatgacaataatagggacaggcacaactttagcgttattcttttttgcaaaaccaatagtatcatttttgaagtgggattcaaaagcgtattactcattaatcggaatatcatttgcaccaattgtaatatcctttgtaactatatttagaggattctttcaagggctgcaaaatatgactccgtcagctatatcacagataatagagcagattggtagggtcatattcggtgttggacttgctgtatttttactacctagaggcatagagtactcagcaggtggtgcagcatttggagcaactgcgggagctgttcttggaggagcttatttatactcgaattataaaagagtaaagaaacgttatgccattaaaaaaataaaaagtaatccagaaatattaaatactatattaaagattgcaataccaatatcattaggtactacagtatcaagtattatgaatttaatagattccattttagtaccacaaaaactattagatgcgggatttacgaatgtacaatcaactgtattatatgcgcaattaacaggtaaggcatcagtaattgtaaatattccattaactctttctatggctatttgtacatctctaattcctatcatagctgagaattttatacttaagaaacagaaagaactaaaaagtaaaatagatgcatctatgaagatggcatcagtgattgctattccgtgcacttttgggttattctttttagctgaaccagtaatgaagtttatatttccaggcaggtttgaaggaatagagatattaaaatatttatcattaacaattccttttataataattactcaaacaacaacagcaatactacaaggaacagggcattatataaaacccgttattaacctcttgattggatgtttgattaaaattgtattaacatgggtattagttcctatgcaaatgtttaacatatatggtgctgttttggcgagctttggagcttatttaacagtaagtattttaaatataataatgatgaaatttacactaagagtaagacttaacttatacgaaatattaataaaaccttgctatgcatccagtattatgatgttaattgtattaataagttataatattttatataagaatacaattagtaatggaatatcttgcttgacatctatatttttgggtatgatagtatatattataatgataattgtattcaaggtatttaatgttgaagaaataagagatagatttaaaagaaagtaaaaaggagagaaattctaatgattaagatagtgggattaggaccaggaagtaaggatgcattgacaataggagcaataaatgaactcgaagcaagcaaacatatatttctaagaacagaaaagcatccaacagtagattacctgaaggaaaaaaatatcgtatttggtacttatgataatatttatgatagtatagataattttgatgaagtatacttaaatatcgcaaaagatataattaataaacataagaatatgactgatttaatttatgcagttccaggtcatccattggttgcagaaaaatcagtatttaacttaatagaactatgtaaagaaaatggaatagaatataaagttataccagcagtaagttttatcgatgcaatgattgaaagtcttaagattgatcctatagaggggttaaaggttatagattcttttgacataagtaaccaaattttagacaaaagaataggaacaattgttacgcaggtatacaatcaattgatagcatcagaagttaaattaagattgctagaatgctataatgatgaaacagagatttattatgtaagagcagccggaatagaaggtcaggaaagcataagaaagataccgttatttgaactggatatgcaggatgacatagattatttaacatctatttatataccaaaggatttaaaaaacaaaaaagactttaatgactttttagatataatagaagttttgagaggtgaagatggatgtccgtgggatagagaacaaacccataagtctcttaagaaggctttaatagaagaaagctatgaggtaatagacgcaatagatcaagatgatgataattcgttaatcgaagaattaggagatgtacttcttcaagttgtttttcatgcatctattggaaaagaagacggatatttcgatataggagatgtgatagaaggaatttgtaataaaatgataagtaggcatcctcatgtatttaaagatgctgatggattgaattcctcagaagatgtactaatgaagtgggatgagttaaagaagaaagaaaagggatataatagtgttggtgatgaaatgaaaggtataacaaaagggttacctgcacttttaagagcacataagatccaagaaaaagcaagtaaggttggatttgactttgaaaatatagattttgctgtaagtaaggtaaaagaagagttaaaagaagtaattgatgtatataatacagaaaatgtggagaaaatagaagaagaagtcggagatttaatattttcatgtgtaaatattgcaaggtttctgaaagtagatgaggaaatagcattaaattgtactatagataagtttataaaaagatttcagtatattgaaagagcagctaaagataagaatattgaattaacaagtatgactttagatgaaatgaatgaactatgggaaatttcaaaaaacttaggttaataggtaatttaaataaaggaattttctagtttatgaagaataataattttataaagaactactttgtaacgatttattggattatttagttatatataggaaaagaaagcgtttttctatagacgggtagctgaagaggttatataataaagaagtgcaatttagtacataaagaaaacagttagaaaatatgtaactggattttaaggaggatgttattgtgaataaagcagaattaattactagtatggcggaaaaaagtaaattaacaaaaaaagatgcagaattagcattaaaagctttaattgaaagtgttgaggaagcactagaaaaaggagaaaaggttcaattagttggatttggaacttttgaaactagagaaagagcagctagagaaggaagaaatcctagaactaaagaagttataaacattcctgcaacaacagttccagtatttaaagcaggtaaggaattcaaagataaagttaacaagtaataaaatacaagttagacagagtaaatatgaacccgagttttctcgggttcttttgaatggaggagaaattgtgaggctagataaatatttaaaggtatcgcgtattataaaaagaagaactgtagcgaaagaaatatgtgagagtggtcgtatattaataaacgggaaagtagcaaagccttctacaaaaataaaagaaggagatataattgaaataacttttgctaataaagtattaaaagcagaaattgctagtatagcagaacatgtgagaaaagaagaagcaaaagaaatgtatattatccttgagggtgaggaagataaagagtagaaactgtatagtttatctactctttatctatatatatgggtattgaacaagaatgatttatgttaagtaaaattatcataaataataacacttaatggcttctaagaaataacttgatataaattttactatacttaacttattaaaggttctaaattctaaaatacaaaatataaacatatattgtataagaaaaataaatggaggaatttttaatggagaaaagagtggaaaataaagtagaagataataaatcaagtttatctctagagaatagaaaaaaattaactttaagtggtgttatagaggttataagttttgatgagcaaaaaatagatttaacaactaatctagggaatttaactattaagggagaagagttaaaaatgaacaagttggatgtgcaaaatggcgatgttataattgctggaagcattgcatctatggtatataatgggaagatatctaagaaaagcaatgaaagtataataagcagattgtttaagtaggaatatagtatgcctttaggattgaatatgcagattaaccttgttgtatgcagcttaattggaggtgttataacgggaatattgtttgatatatatagaggaataagaggattaaactctataaaaatattaacaataatagaagatatgctattttgtgtacttattgctttgattgtgtttacatttttattatatactaattacgcatttttaactccctatgtatatattttcataattatggccattatattatacttcaaatttattagtaagtatttttataacagcgagatgctaattgcaaaattatcttataagttgattagaattttattgaaaaatttattgtatccattaaaaataattgcatataaaattacagataaaaggaaatgataaaaaattacttgaataatactaatatagtgtttacaatagacttaagagaatttgcaaaatagaggttcttatagatgaaaacgaagttaatattaaagcggacaataattactggatttattattttctttgcctttagttatattaggcaaagtataacaatgaatagaattcaaaaggaaattgacagtaagcaagttcagttaaatgaaatcaatcaaaaaaacgaaagacttcaagatgaagttgataaaattaattcaaattcatcggattatcttgaaaaattagcaagggaaagacttgggatgattaaacctggtgaaaaagttgttaatggtgagataacaaatcaaaattaaatttcaatttatagaaaaacttataaaactctggtaatattatagtagctgaataattaaatttgtattctaaattaaagagcatctgcacagcagatttgttcttataaatttatatatttttaaatttaaggaggagtcttttaaacatgaccttaatggcaggaaacatagtagagggcacagtgataaacatcacaaactttggagcttttattgaagttgaaggcaaaactggattagttcatatttcagaagtggcagattcttacgtaaaagatattagagaacatcttagcgagcaagataaagtgaaagtgaaagttatctcaattgatgataatggtaagattagtctttcaataaagcaagcaaatgttcaaagaaaatcggttaaaccagcagagattgactggaaagcacctgataagaagaaaactactaattcaggaaatttcgaagatattatgtctaagtttctaaaagatagcgaagaaagaatgcaagatgtaaagaaacatcaagaatttaaaagtaaaggtggaaaaaaaggctactaaaaatttttaaaatctttattaggaaaataaatataaaatttgcttgataaatttcaaatgtagaatagatttgtagagaaatttttatatttgtttacagtttattctgcattattaagattataaatgggtatttatagtgattaaaacgtgtaagttaccgattattacaattaaaattttaaatatttaagattaataaaaaaatattgttgacactgaaaataatatgtattataattagccttgtcgttggaaattagtttataagatatgccgaagtggcggaactggcagacgcacaggacttaaaatcctgcggtggttaaacaccgtaccggttcgattccggtcttcggcaccatatatatgaaaaaaataatatcgcggggtggagcagttggtagctcgtcgggctcataacccgaaggtcgtaggttcaagtcctgcccccgcaaccattgatatggcggaatagctcagctggctagagcactcggttcatacccgaggtgtcgtaggttcaagtcctatttccgctaccaatatgtgccgaagtggcggaactggcagacgcacaggacttaaaatcctgcggtggttaaacaccgtaccggttcgattccggtcttcggcaccatatatatgaaaaaaataacatcgcggggtggagcagttggtagctcgtcgggctcataacccgaaggtcgtaggttcaagtcctgcccccgcaaccattgatatggcggaatagctcagctggctagagcactcggttcatacccgaggtgtcgtaggttcaagtcctatttccgctaccaatatgtgccgaagtggcggaactggcagacgcacaggacttaaaatcctgcggtggttaaacaccgtaccggttcgattccggtcttcggcaccatatatattaaaagaataatgtcgcggggtggagcagttggtagctcgtcgggctcataacccgaaggtcgtaggttcaagtcctgcctccgcaaccataaagtttagtaagctttgttatcaaagctttaatttatatgtcgtaagcttgtagtatacaatgaatatgccgaagtggcggaactggcagacgcacaggacttaaaatcctgcggtagttaaacaccgtaccggttcgattccggtcttcggcaccatatatatgaaaagaataatatcgcggggtggagcagttggtagctcgtcgggctcataacccgaaggtcgtaggttcaagtcctgcctccgcaaccataagacttaagcaatagctcaggtctttttttgtttggaaaatatttattatatgaagtataagataaaggtataatattctgaataaattcctagccattgagaagaaaactttagcatcgatttataatgctaagaatgagatatttaaagtttacttttctaacatggtgtttaaattagttatagatagaagtttaatatgaatgtagatgactacacttatgttaggctttttttagtacttaatattttgagtactgtaagttaacttgtcataagattgattaccgaatacgaattttggtcacttaagccaagaaaatccgagaataatcgtaaaaaatattattttaaggagtaattaaaaagtgtattcacgatttataattttatgaaaaatattttatatataaatttctaataaaataagattaacgacaaattaattataacgttttaaatttgataattagccagatatcttgatttgccttaactaagtaagatgttagatcaaaatgtaataaagaaaataatctattaaatcattagatattagagaaatttagatgaagttgtcctacgaaaactttataccataaacaccttatgacatttatcgtagtgttatgatgctataatcaaattacattatttggaaatgaggcgagctaatgtgcagtatggattagggttgaataagtatgaaggaataactagagtagaaaacttaagaaaaaagttgtggatgaagacatctatagtgaagttagggattattctaatatcaggaatcttactcggcagggtaaatttattattaaatcaatcagatagtcttggtatagcgccaataggaattgcgtatttgatagctgtagttacaaaagagaataggagaaatagtttaattgtagcaattggaattgctataggatatctaacaataagtagtttgctgacagatggttatgtatatttagtagctgtagctttagtcacaatttactatgtatttatagcacaagctaaaaatagaaaaaaggaattagtgggttttgtaataattttaagtagttttttttgttatggattactagttaataaatatgaacttggcgtaaatataactttatgtttaatacagacattaattgtagtgcctatatattatgttataaagtatgcgttaaattctttggaagagattaataccaattacttcttttcttcagaggaaatagtaagtattgggatatttttatgtttattagttgcaggaataggcaatgtaaatattagtaattactctataagaaatatatgtgcgcttacgttagttttaacgattgcttatgtaggtggagcaacatatggaactatgattggagtttctatgggaataatgcttggagttgcttcaaatgacatgatgtatagtgtagccttttttggagttggaggcttaattgttggtatatttaaagatacgggaaaaatattttcaatactatcaggtataataatttatactgcattagctttatattctaatgcagtaacattgaagttgggagttgaggttcttactagttctgttttatttttgtgtgttccaaaacctgtatttacaagtattgaaattgagataaatccatatagaaagaaagcatctttaggcgaaattcaattgaatgcaataaaggaggaatttacttttaaattaaaagaacttacaagtgtacttacaaatgtatcaagatgcttattaactaacaatgataatgaaaatttattgattaaatcgaagggaagtgcattggtagaaaacttggcagatagaagttgttcaagctgtgaaaatagacctttatgctgggaaagagagtttcatcaaacatttaactcttttcaaatgttaattcaaagtaaagaggagggtaaattagcaattcctatagatttgcaaaaaagatgcattaagaattttacacttttaaaaaatgcggaagggattgtaactaattataatgtaaatgaatcaataagggaaagattagcagaaggaagaaatatattatcatcccatataaccaacatatcgtgtactttagataatcttcttagtgactttaaaaaggaggttagaatagatactgatttagaaaggttgacgaaacgtatactaaataagaattccatatattacaatgatattttttgttatatagataaaagcggtagggttaagattagattaagtgtaaataattgcgaaggagctgattattatggaaaaaacatagtttctctattaagcagtgctatgagaatgaagttgtgcattggggatgatggatgcaaaataaatccaaacacaaatgaatgtattataacgatagaagaaaagccgaggtattatatggtatcttatggtgcaatggaaccaaaaggtggagaaactcaaataggtgatagttatagttttggaaggacaagaaatggaacgtatatgactatcctaagtgatggaatgggttctggaccggaggctaaagaagaaagcaaagcaactgttgatttggtagaaaagcttattgaggcagggttcgatgaggacataacggtcaacacagtcaattctataatgggaatgagattctcagaagatgaaaaatatgcaactttagatttaaatagaattgacttatataatggtaatgcaatatttgttaagataggtgcagcacctagctttatcaagagaggccgcgatgtaataactattaattctaagaatttgccttttggacttgtagatgaagtggacgtggaagttataagagaagtgctaagacctggtgatattttaattaatgttagcgatggtattttagatatagataaatcaaactctggagaatcaacttggattgaagaatatttaaagacgattaattcagatcctagagaactgtcagaaaaggtgctagaaagagcaaagaaattaagcaacggaacgattaaagatgatatgacagttgtagtttcaaaagtttatttagatagctaagattatcgtgcgataatttattaaaatattataaatagctgtttcagaaatttaaattgtaggttaaatttgaaacagctatttgtatttgtttcatattcaaataaataagattgttttaaataataatgttatatttatatagaatgagttttcaactgttaaattgaagcaataatgtttacatttagaacgtatatacgtaaaatataagaagcggaattgtatatgacataataataaataagtaggagtgttatttttgtatagaaaagtactgtcttatataaaggacaataaccttattaaacctaacgataaaattttgattgctctttctggagggccagattctatatgtcttttaaatgttttattcgagttaagagaaaaattaaatataagcatagctgctgcacacttaaatcatcttttaagaggcgaagatgcatttgaagatgagaaatatgttattaatatatgcaaccatatggggatagagtgttttgtcaaacgtgtggatatcaatgcttattctaaggaaagtaaattgtcttccgaaatggcaggaaggagcgccagatatgatttttttgatgaaatcttaaagaaagaaggttttaataagattgcgactgcacataatgcaaatgatcaggcggagacagttttgtttagacttatgaggggcacaggccttgaaggattaggaggtatcagggcatctagagatgataaaataataaggcccattttatgtttaagtagagaggaagtagagaattacgtaaaactaaagaacttaaatccaaggattgataaaactaactttgaaaaaatttataatagaaataagataagattagatatattgccatatataaaagaaaattttaatgaagatatagtacagactttaaataggatgtctacattattgcaaaaagataatgaattccttgaaaaattatccgctggtttatacaataaatattgtatagaatgtaatgattattttataataaaaaaggaaatatttaaagaggaagaacctttggttaatagagtattaaggcatgcattaacaaggtattcaaagtctaattacgattttgaagttaagcatatatatgagatatcttgtttggctcaaaaatactcgggaaagttagtgcatctcccaaatggagtttgtgctgaaaatgtttatggggatatatacataaaaacgaagacaaaaaaatcagatataaatagtaaaaaagaagaaataattttaggtaaagataacatatatataaatacagttgagtttcataagtatattattcaattttctataattaatggttataatgaaaatgctataaacttaaagcaaggagatttcgttaagtattttgattttgataaaattaatagtaatatttcaatacgaaacagaaagaatggagataaaattactccattaggaatgagtggcagcaaaaaaataaaagatatttttattgatatgaaaattcctaaagatgaaagagaatgcatccctattttatgctttgatgaaaggattgcatgggttattggaattagaatatcagaagaatataaacttacaagtaaaagtacgaatatattaaaagtagtcgttcaaagaaaggaatattaaatatgaaacaagatatacaagagatactatactcagaagaaattttaagtaaaagaattaaagaactcgcaagtgaaataagtacagattatagaggaagagatttacttatagttggtattttaaaaggatcagtaatatttgctgcagagctaataaaaaacatatctattaaatgtgaaatagattttatggcagtatcaagttatggaagttctacagaaacatctggtgtcgtaagaatattaaaagacttggataatagtatagaaggaaaagatattttagttgttgaggatatcgttgatacaggagtaacattaacatatttacttaaatatttaaaagcaagaaaagcaaatagtatagaaatagttgcattactaaataagcaagcgaggcgtaaatctgatctagatgttaaatatattggatttgaggttcctgatggattcatagtaggttatggaatagattatgctgaaaagtacaggaatttaccttttatagggatattaaagcctgaagtatatgaaaaatagaaaattcaaatttaattgtaataaaaatattcctatggtaaaattttaaatatgatgagagaggggggccttgaatgaaaaaatattcaagtgcggctgtatggattgtatgctcagttatgctaattttagcagcggttactatgtggcaaacaggaaaaggttctaatgagataacttatagtgcatttatacaaaagtggaatgcaaatgaaatagaaagtatcttagtcaaggaagacagtatgacgatagaaggaaaaactactgataataaaagttttgttactattgctccgggtgaacttgttagttctcttatagtaaatcagcctaaattagatgttaaagttgtttttgaaaaaccatctaataatgcaacgtggatagcaacattacttccatttatattaatggcagtatttatatttatattcctatttatatttactcaacaatcccaaagcggaagtggtggaagaggggttatgaattttggtaaaagtaaagctaaaatggtaactccagatacacaaacagtcacatttgaagatatagcaggtgcggatgaagagaaagctgagcttgaagaaattgttgattttttaagattgccatcaaagtatatacagataggtgcaagaattcctaaaggggttttattagttgggcctcctgggactggaaaaacattacttgcaaaagcaatagcaggagaggcaggagtgccattctttagcatatcaggatctgattttgttgaaatgtttgttggtgttggtgcatcgagagttagaagcttatttgaagaggcgaagaaaaattcaccttgtatagtatttatagatgaaattgatgccgttggaagacagagaggtgcaggcttaggtggaggacatgacgaaagggaacagacattaaatcaactgcttgtcgaaatggatggatttggtgctaatgaaggcatcataatgatagctgcaaccaataggcctgatatattggatccagcattattaagaccgggaagatttgataggcaaataattgttggagcaccagatgtaaaaggtagagaagaaattcttaaagttcatacaagaaagaaaccactaaaagatgatgtgaaattagatgttcttgctcgaagaactccaggtttttcgggagcggatctagaaaatttaacaaatgaagcagcactgcttgctgttagaaaagataaaaaacaaatttctatgtctgaaatggaagaagcaataacaaaagtaattgcagggcctgaaaaaaagagtagggtaataactgaacatgataggaaattaactgcttatcatgaagcaggtcatgcagttgttatgagattacttccacactgtgatccagttcacgaaattagtgtaattccaagaggtagagctggtggatacactatgcatcttccaaaggaggatacttcttatacatctaagtctaaattaaaagatgagatggttggactcctaggtggaagagttgctgaaaaattgattatgggagatataagtactggtgctaaaaatgatatagatagagcaagtcatatagccagaagcatggttatggattatggtatgagtgaagaaattggaactatatcatttagtacttcagggcatgatgaagttttccttggaagagacttaggtaaaggaagaaactttagtgaagagataggttctaaaatagataaagaaataaagagatttatagatgaggcttatgatagagcaaataagcttctaaaagaaaatataaacaaattacatgctgttgcaaaagctttaattgaaaaagaaaaacttgatgcagaagaatttgaagatatttttgtaaataattaatatacaggctatttcaagcataagatgggtttgaaatagccttttaattttttatatgtagaatcatagaatattcatacaaatacgaatattaggagtttatttatacttattattcgaaaaaaacttttattatgtatagtgaaatgatataataaattatattaagtatgattttgggtttatatttaggagggattttaaatgaaaagtgatattcagattgctcaagaggcaaagatggaaccgataaaaaatgtggctgaaaaattaggactttgcgaagatgatatagagtactatggaaaatataagtgcaaaatatctttagatgtatatgataaggttaaaaataataataatggaaagttagttttagtaacagctataaatccaactcctgcaggagaaggaaagtcaacagttacagtagggcttggtcaggctttaaataggattgggaagaaagccgttatagcattaagagagccatcattagggccggttttcggaattaagggtggagcagctggaggcggatacgctcaagttgttcctatggaagatattaatcttcattttactggagatatgcatgctattacatctgctaataatttgttatcagcagcaatagataatcatattcaccaaggtaatgttctaagaattgattctagaagaattgtatttaaaagagtaatggatatgaatgatagagcattaagacatattattgttgggatgggtggaaaggttaatggatttgttagagaagatggattcaatataactgttgcatctgaaataatggctatattatgtttagcaagtgacctagaagatttgaaagaaagaatgggaaatatagtaattgcatataatttagatggaaatcctgtttatgctaaggaactagaaatacaaggagctatggcactattaatgaaagacgcgattaaacctaacttggttcaaacattagaaaatactcctgcattaatacatggaggaccatttgctaatattgctcacggatgtaattctataatggcaactaaacttgctctaaagttaggagatgttgtcataacagaagctggatttggagcagatttaggtgcagagaaattctttgatatcaaatgtagatatggtaatttagaacctgaatgtgttgtagttgttgcaactataagagcattaaagcatcatggcggagtagctaagactgagttaaatgtcccaaatgttgaagcgttaaaaaatggaattgctaatttggaaaaacagatagagaatataaagaagtttaaaattacacctgttgttgcaataaataaatttgttacagatagttcggaagaagtggaattcattaaagatttctgcgatagaattggggttaaagtagccttgtgtgatgtgtgggctaaaggtggcgaaggtggaattgaccttgccaatatagttttagatgcactagataatagtgaatcaaattttgagcctatatatgataaggaaaaatctattagggagaagatatttacaattgctagtgaaatttatggagcagataaagttaactatactccagcagcaaaaaaacaaattgatgaattagaaaagttcaaattggataaacttcctatatgtatggcaaaaacacaatattcactatcagataatcctagccttttagctagacctacaggatttgatattacagttaaagaagtcagagtatcaaatggagctggatttatagtggttcagacaggtgacataatgactatgcctggccttccaaaggtaccagcggcaaataagatggatgtattaaaaagtggagaaataataggattattctaatgaatgcatatatgtgtatttaaggtgaaaacagaagctagaaaatggtggtattaatctaaagtcacatttaaactcttgacaaattaaatataattgttaaaattatattgttattttttagtcaatttcaaaattaaggcagctcttcgggctgcttttaatttaactatattaaggtggtgctttctatgattttacttgttgatgcaggtaatactaacattgttttgggagtacatgatggagaaaagtatatagctagttggcgtatttcaagtgaaggaaataagacttcagatgagtatggtatacaagttatgcaactatttaacttaagtgacattaatcctaaagatattactggagttatagtttcttctgttgttcctaatataatgcattctttagaaaatatgttaagaaaatgtttttgtcacgaacctataatagttggaccaggagtaaaaactggaataaatattaaatatgataacccgagagaagttggagcagatagaatagtgaatgctgttgctgcatatgaaatttacaagagaccagttataataatagactttggaacagctacaactttttgtgcagtaagagcaaatggagattatcttggaggatgcatatgccctggaataagaatttcggcagatgctttatttgaaagagcagctaagcttcctagagtagaattagaagtaccaaaaaatatgatttgcaaaaatactgtatcaagtatgcaatctggtattatatttggttatattgggcaagttgaatatatagtaaaaaaaatgaaacaagaaatgaaaaattctaagtataaggaagaaccttttgtattagcaacaggtggattagcaaatttaatagctaaagagactgatgttattgataaggttgattcggatttaacactagaaggattaaaaatattatatgaaaaaaataaagaaatagagatttcccaaagataaattatatggaaattgagatttatacaagatgtaaggagtatattctacaatgaagatagggaatttaacctttgaaaacaatatatttctagcacctatggcaggagtaactgacatatcatttagaggattatgtaaggaaatgggatgtggtttggtttataccgaaatggttagtgctaaagcattatattatggaagcgagaatacacaaaccttacttagaatagcagatgaagaaaaaccagttgcagcccagatatttggtagagagccagatgtgatggctagaatttgtgaagaatatttaaataacagggaagatatttgtatcattgatattaatatgggatgtccggctcctaaaatagttaaaaatggagaaggctctgcattaatgaaagaaccggaacttgcatacgatatcgttagaactataaaaaaagtttcaaccaaacctgttactgtcaagtttagaaaaggatttgatgaggataatattaatgcagtggaatttgccaaagggatggaacaagctggagcagatgctattgctgttcatggacgaacacgaaaacaaatgtatcaagggaaagcagattgggacataataaagagagttaaggatagtgtttcaattcctgtaataggaaatggggacgtattttctccagaagatgctattagaatgaaaagaactaccaattgcgatggaataatgattgcaagaggaagccagggaaatccatggatatttagacagataaataatttgcttaatggagaagcaattcaagaagtttcagataatgaaaaaattgaaatgtgcattaggcattacgaattagcaataaaatatgatggggaatttaaagcgataagagaaatgagaaaacacgcatcatggtatattaaaggacttccaagatgcacagaacttaaaaataagattaatactatcaatgatagtgaaaaagttattgaagctttaagaaagtatcaagatgaattatagttttgtaagtataactagaattatttaatggtttcaagcatattattaatatttagaaaaatgcaatttgggttcataataaatctagtataaatatgagtattaatttttgtgtaaaaatgataagttatgttttactaatttacttttatattaatatttaaacttggtttattcaatgtttgattcataggaatcatagctgagagcaaagttacgctgagttagttgctaaccaacggtgcaaattaggatttattgacatatgaaatgtgctgatttataataagttaaatgattttcagattaaaatatttttcaaattattataaatttataagtattctctgttaacgatataataagagattgcttaaaaagatttatttaataggtaatttatcaaaataaggattataatcaataactaaaataaataatatagaaggttttaaaggggagttaaagtatatgagccaatcaaaacaatatgttatgacttatgaaggtgttaaaaaattagaaagtgaattagaatacctaaaaacagtaaaaagaaaagaaataactgaaaagataaaaattgctttaggatacggagatttaagtgaaaattctgagtatgatgaagctaaaaacgaccaagcatttacagaaggaagaataattcaattagaaaatatgcttaaaaatgcagtggttgtagatgaatcagagatcccaagtgatattgtttcagttggatcaaaggtaaaagttaaagattatgaatttgatgaagaagtagagtattcaatagtaggttcggcagaagcggatcctatgaattttaaaatatcaaacgaatcaccggttggaaatgcactagttggtaaaaaagttggtgatgtagtagaggtaatagttccagacggagttaataaattcgaaatactaggaataagtagaagttaattggaggtacagcaatgtcaacagaagaaatgagcatgcaagagttagagtctcagtataatgaacaggaaggattgagaagagctaaactagcagagctacaaggtgctggaaaggatccttttgatgtttataaagtcaacagaactcatacatcagaggaagttaaggcaaactatgatgcactagaaggtaaggaagtaaccgttgcaggaagactaatgtctaaaagagggcagggaaaagttgttttctcagatatacatgataaggatggtaagatacaattattcttaaagattgataaggttggggaagaaaatttaaagcgatataaaacttttgatttaggtgattggattgcagcaactggagaagtattcacaactaaaacaggtgaagtatcagtaaatgtaaatacttttgaattgacttgtaaatctttaaagccacttccagagaaatggcatgggttaaaagatccagatttaagatacagacaaagagaagttgatataattacaaattcagaggttaaggatacttttattaagagaagcaaaattatatcagcaatgagagagtttttagattctaagagttttatagaagtagaaactccaattcttggagcaatagctggtggtgctgcagctaagccattcattactcatcataatactttagatatggatatgtttttaagaattgcaccagaattatatcttaaaagattaattgttgctggtttcgaaaaagtatatgaaataggaagaaatttcagaaacgaaggaatgtcaattagacataatccagaatttacatctattgaattatatgaagcatattcagattataatgacatgatggaaattacagaaaatatggttgcatacatttgtgaaaaaataaatggaactactaaagtttcttatcaaggaacagaaatagattttaagccgccatggagaagaataactatggttgacgctgtaaaagaatatgcaggtgtagattttaatgaaattaaatctaatgaagaagctcaagctatagctaaagaaaagcatttggaattttctaagccattggatactgttacaaaaggtgatgttctaaatgccttatatgaagaattcggtgaagcgaacatgattcaacctacatttgttatggattatcctgttgaaatttcacctcttacaaagaaaaagagaggaaatcctgaattcactgaaagatttgaaggatttgtatttggtagagaactttgtaatgcatactctgagctaaacgaccctatagttcaaagagaaagatttgaacaacaagctaaagagagagaacttggagatgatgaggcatatatgcttgatgaacaatttatgagtgctcttgaaacaggtatgccaccaacaggtggaatgggaatgggaatagatagacttataatgttcttaactgattcagcttcaatcagagatgttatattattccctacaatgagaccgcagaaataatttgatacagttaaagtaaatagattatatttatttctataaaaaggttctatatgtataaaaggcatatatgaaccttttattgttgttgatttaaaaatgaaatataagaaacataatttgaaatcaggaactctataataagtccagaaatattttattatctgcataaatatttataggaattattattacttttgaataataagaaagaaaagctataagtatttctgaaaactacaaaagtaaataaaatataaaaaagacttgcataatttaaaaaagctgatataatagattaagtaatgacgttccgcgatagctcaatggtggagcactcggctgttaaccgataggttggaggttcgagtcctcttcgcggagccatttttttttattttttagaatagtattataagttatagcatgtattttggaagcattgttatagctttttttattccatatgaatttatactaaatttaaatttgtgaacattattactcttgatggcataagttatggaaatacttactcagagaatcacagtttgtaaagagaatgaaaaaatatattagcctgccgaatttttctcacttacatttgaaaaatcagatgcgcaaaaatctacagttccacaatcgcttgagattttattctttccaagttttataaagatgaattaggaatatataatatgtattaatcctaaaatgtagatgctatttgataattttgatagtatagagatataaatttgatattttattaaaaaagggttgcataatctaaaaaagctgatataatagattaagtaatgacgttccgcgatagctcaatggtggagcactcggctgttaaccgataggttggaggttcgagtcctcttcgcggagccattttttttatattttttagaatagtattataagttatagcatgtattttggaagcattgttatagctttttttattccatatgaatttatactaaatttaaatttgtgaacattgttactgttgaggggataagctatggaaatgcttactcagagaatcacagtttgtaaagagaatgaaaaaatatattagcctgccgaatttttctcacacacatttgaaaaattagatgcgcaaaaatctacagttccacaatcgcttgagattttattctttccaagttttataatgatgaattaggaatatataatatgtattaattctaaaatgcagatgctatttgataattttgatagtatagagatataaatttgatattttattaaaaaagggttgcataatctaaaaaagctgatataatagattaagtaatgacgttccgcgatagctcaatggtggagcactcggctgttaaccgataggttggaggttcgagtcctcttcgcggagccatttttttatatttttttagaaaatattgaatcttgacatataaaatgattttgttaaaattaatttataaattaaatacacatgttgaaaaagaagagtaatttataagtcagttgaagagagatgatgtttggtggaaatcattattggttataaatgaatggagcttttgagtgtgaggaaatcgatgaagaaagatgggcttaagccaagaagggtggaaccgcggaattatatttcgtccctttgtgcttaaagccctttttattttataaaaatatatttggagggataaaacaatggcagtagaaaaaacaatggataagattgtggctctttgtaaaaatagaggatttgtatttccaggctcagatatatatggtggtctagctaattcgtgggattacggtcctttaggagtagaattcaaaaataatgtaaaaaaagcatggtggaaaaagtttgttcaagaaagtccttataatgttggattggattccgctattttaatgaatagagaagtttgggttgcatcagggcatgttggaggtttctcagacccattaatggattgtaaggaatgtaaggcaagatttagagctgataaattagttgaagatcatatgacagaaaatggagcagaagtagctacagctgatggatggactaatgaacaattgaaagaatatattgaaaaaaataacatagtttgtcctaaatgtggaaaaatgaactacacagatataagaaagtttaatcttatgtttaaaacattccaaggtgttactgaagatgctaaatcagaaatgtatttaagaccagaaacagcacaaggtatttttgttaattttaaagcagtgcaaagaacatcaagaaaaaaagtaccatttggtatagctcaaataggtaaatcttttagaaatgaaattacacctggtaattttactttcagaacaagagaatttgaacaaatggaattagaattcttctgtaagcctggaactgatttagagtggcacaaatattggaaggactattgctggaatttcttgctaaacttgaatgttaagtcagaaaatttaagaatgagagatcatggagaagaagagttatctttctactcaaatgcaacttctgatatagaatatttattcccatttggttggggagaactttggggaatagcagatagaactgactatgatttatctaagcatcaagaacattctggccaggatttaagctatttagatcaaacaactaatgagaaatatgttccatatgttatagagccgtcgttaggtgcggatagagttgctttagcatttttaattgaagcatatgatgaagaagagttagaagggggagatgttagaactgtaatgcatttacacccagcattagctccttttaaagcagcaatattgcctctttctaaaaagctatcagaaaaatctttagatatttatgcggagttaagtaagaaattcaatcttgatttcgatgaaacaggaagtataggtaagagatacagaaggcaagatgaaattggaactccttattgtataacaatagatttcgatacattagaggatgagtcagtaacaattagaaatagagatactatggaacaggaaagaattaaaataagtgaaatagaaaattatatccaagcaagtttggaattttaggattatacctaaacaaaaactgattcaagataatttcttcttgggtcagtttatttttttgttgcaagtgttataattaaaataacgaagaacaaattttggcaataatatatacgatggatagagatttaaatttggaggataaatcatgaagaaagattttaatgagtttaaagaatttatagtgggtaagaaagttggagttgttggaattggagtgagcaatattccactaatcaattttttaatagatttaggtgctgctgtaacggcttttgataaaaagaatttagaagaacttggagacgttgcagatggatttaataaaaagggagttaagctggagcttggagaaaaatatctagataacttaaaagggtttgatgtgatatttaaaacaccatcaatgaggattgatagtgaagcattagtaagggctagaaaagaaggggcatatgttacttctgagatggaagagtttgtgaaatatacaaaaggaaagatctatggaataaccggtagcgatggaaagacaacaacaacaacaattatttctaagctactagagggtcaaggttataaaacatgggtgggaggaaatataggaactccattattttcagaaatagaaaacatacatgatgaagataaagttgtgctagagttatctagttttcaacttatgacaatgactcaagaaatagatgttgcagtatgtacaaatttatccccaaatcacttagacatgcataaaagtatgcaagagtatatagatgcaaaaaagaatatctttatatatcaaaattcaaatggacttttagtagtaaatagagaaaatgaaattacccatggatttataaaagaagcgaaaggaaatgtgaaagagttcagttcaaaaagagaattgatagatggtgcatactataaaaatgggatactctatcttgaagataaggaaatttgcaaaaaagacgatatcgtaattaagggaatgcataatgttgaaaattatcttgcagcatttttggcaacaaaagacgatgtctctgtggatgtgatgaaaaaagttgctgaaacatttgctggtgttgaacataggtgtgaacttgtaagagagataaacggagttaaatattataatgattctattgcttcaagtcctacaagaactttagctgggcttagagcttttgacgaaaaggtaatagttattgcaggagggtatgataagaatataccttttgaacctttagcatatgagggatacccatatataaaagaattgattcttatgggagcgacaaagcacaagatcaaagatgtttttgataatttagataaggaaaaaggaattaaaattaatataaatatggttgagtctttagaagaggcagtaagacttgctaaaagcatagctaatccaggggatattgttactctatcacctgcttgtgcatcatttgatatgtatcctaattttatgataagaggtaataagtttaaagagatagtgaagtctttataagtgcataatgcaagaaataggagataagtgtttagttataaatacttatctcctattttgcattaacttttagaagaaaaatctttgaagtatatattattcacatttatacttgggctatagaatatacctgaggtagtcaaataatattcatttataccctctgatatctctgatttagaggtggcggttgaattttttaagtctactgataatgaatataagttatttgagtcactgccgttaataaaatatatagatttatctataatcttcaactgaaatccattcattatagaaattctcttgcagcttaatgtagatgggtctagtgagtatagattattattatcagaagaattgaaaaaaagtaactgcccatcaaaaactatgaaactattagctgtgtaatcggtaagtttttgtctattagtaccatccgtttttattgaatataattttgagttatcacttaagttttggtagacaataaaatctccattaattataaaagagcctacactatcagagcataccaatgagtgctctgctgttgatgtattatatttgtaaatcttattttcgttatttttatttatgtagaataattctgaattagcagctattaaattatttactgaatcgtcatttaactttgtataagctttatcagaaatgttaaatgaagataaagtattattatctgaaccatttgaaaaataaatcatttgattaattaagaccatattgtcagcagaataatttgcaaaatcagtaacgcttttactttccagaatatctttaggcaaaggagaagggataatcgaaattctattattctcatctggatttggaaatattaagttgttaccattaaaaaggaatgggcaaaagtatgacgagctaccagttaaaataaatgaattaggatcagctgcatccgttgcctgggtattttgtacttgtattgatgtttttgaaggggtagctgtctgtgagttcgatggcgaagcgatgttgcttgagcatccaataaaagaaaacatggtaaatggtaaaatgaaataaaaaaatcctttattcataattaaaatctcctgaaactaaaattatatataatagtatttttagataaatagaataattaactattaagtaatgaagtatattctattctatactattaatattagagtagattgctataacagtaaagacgttgttatatgttttttgcaggccttttatagaaaataattgaaatgatacaattaacacttccacgtgtgtcctatagtgaaataaggagaatttattagaaaaaggcaggtttattaatcgtaatttttgataacaatggatatataggtaatatcatataaaaaacatgatatgattatattcgttgtcacgagtaattgatgaacaacagataagaagttagctagaaggttttaaataattataaaaaatattaaaaataattattgacaactacagctaatgatgttatcataataaagcagtcaagtttgactgagagatctttgaaaattgaacagaatatgataaatacatttaagtaaaccagcaattctttatttgagtaagctaagattaaactttttattgagagtttgatcctggctcaggacgaacgctggcggcgtgcttaacacatgcaagtcgagcgatgaagttccttcgggaacggattagcggcggacgggtgagtaacacgtgggtaacctgcctcatagaggggaatagcctttcgaaaggaagattaataccgcataagattgtagtttcgcatgaaacagcaattaaaggagtaatccgctatgagatggacccgcgtcgcattagctagttggtgaggtaacggctcaccaaggcgacgatgcgtagccgacctgagagggtgatcggccacattgggactgagacacggcccagactcctacgggaggcagcagtggggaatattgcacaatgggggaaaccctgatgcagcaacgccgcgtgagtgatgacggtcttcggattgtaaagctctgtcttcagggacgataatgacggtacctgaggaggaagccacggctaactacgtgccagcagccgcggtaatacgtaggtggcaagcgttgtccggatttactgggcgtaaagggagcgtaggtggatatttaagtgggatgtgaaatactcgggcttaacctgggtgctgcattccaaactggatatctagagtgcaggagaggaaagtagaattcctagtgtagcggtgaaatgcgtagagattaggaagaataccagtggcgaaggcgactttctggactgtaactgacactgaggctcgaaagcgtggggagcaaacaggattagataccctggtagtccacgccgtaaacgatgaatactaggtgtaggggttgtcatgacctctgtgccgccgctaacgcattaagtattccgcctggggagtacggtcgcaagattaaaactcaaaggaattgacgggggcccgcacaagcagcggagcatgtggtttaattcgaagcaacgcgaagaaccttacctagacttgacatctcctgaattacccttaatcggggaagcccttcggggcaggaagacaggtggtgcatggttgtcgtcagctcgtgtcgtgagatgttgggttaagtcccgcaacgagcgcaacccttattgttagttgctaccatttagttgagcactctagcgagactgcccgggttaaccgggaggaaggtggggatgacgtcaaatcatcatgccccttatgtctagggctacacacgtgctacaatggctggtacagagagatgctaaaccgtaaggtggagccaaactttaaaaccagtctcagttcggattgtaggctgaaactcgcctacatgaagctggagttgctagtaatcgcgaatcagaatgtcgcggtgaatacgttcccgggccttgtacacaccgcccgtcacaccatgagagttggcaatacccaaagttcgtgagctaacgcgcaagcgaggcagcgacctaaggtagggtcagcgattggggtgaagtcgtaacaaggtagccgtaggagaacctgcggctggatcacctcctttctatggagaaatctagatcagcatgatgtctgactagtacagatgcataataatgtatcaaaatttaaatacttgctcaaaggttacttgaagtatttattctgttcaattttgagggattttccttcaaaaagcctcatgggggtttagctcagttgggagagcacctgccttgcacgcagggggtcaagggttcgaatcccttaatctccaccatgagggcttatagctcagctggttagagcgcacgcctgataagcgtgaggtcgatggttcgagtccatttaagcccaccaatgttctttgaaaattgcatataataaatgtatataaaatacaacaaagccaagaataaatattctttgtgatatgactaataattaggtcaagctacaaagggcgcatggtgaatgccttggcatcaggagccgatgaaggacgcgataagctgcgataagcttcgggtagacgcacatagtcagagatccgaagatttccgaatgaggaaactcacatgggaaaccccatgtatcataaagtgaatacatagctttatgaaggtatacccagggaactgaaacatctaagtacctggaggaagagaaagaaaaatcgattttcttagtagcggcgagcgaaaaggaaagagcccaaaccagagatttatctctggggttgcggacagaacataacgagaaatcatagttaattgaacacaactggaaagttggaccacagtgggtaatagtcccgtaagtgaaaactatgataatcagttctgcaccagagtaccacgagacacgtgaaaccttgtgggaagcagggaggaccacctcccaaggctaaatactacctgatgaccgatagtgaagcagtaccgtgagggaaaggtgaaaagaaccccgggaggggagtgaaatagaacctgaaaccatgtgcctacaaccgatcagagcaccttatgtgtgtgatgatgtgctttttgtagaacgagccaacgagttacggtatgtagcgaggttaagtacttaaggtacggagccgaagggaaaccgagtcttaatagggcgactagttgcatgctgtagacccgaaaccgggtgacctatccatggccaggttgaagcgagggtaaaacctcgtggaggaccgaaccacgttgctgttgaaaaagcatgggatgagctgtggatagcggagaaattccaatcgaactcggatatagctggttctcctcgaaatagctttagggctagcgtcggaaaatgtgagtagtggaggtagagcactgaataggctagggggcatagcgcttaccgaaccttatcaaactccgaatgccacatactatcagtccggcagtcagactatgaaagataagttccatggtcaaaagggaaacagcccagatcgtcagctaaggtcccaaagtgtaagttaagtggaaaaggatgtgggatttctaagacaactaggatgttggcttagaagcagccactcattaaaagagtgcgtaatagctcactagtcaagagatcctgcgccgaaaatgtccggggctcaaacttaccaccgaagctacgggttcacgcttatgcgtgagcggtagaggagcgtcgtaatcgggctgaagtcgtaccgtaaggagcggtggactgattacgagtgagaatgttggcattagtagcgagatgtaggcgagaatcctacaggccgaatatctaaggtttcctgagtaaagtttgtcttctcagggttagtcgggacctaaggcgaggccgaaaggcgtagtcgatggacaattggttgatattccaataccactataatcgttattatcgatggtgtgacggagaaggataggatgtgctagctattggatgctagtctaagcgtttagggagttgggattggcaaatccgttccaacaattctgaggcgtgatggggaaggttctacggaaccgaagtatctgattccatgcttccaagaaaagcatctagagagagaagtagtgcccgtaccgcaaaccgacacaggtagatgaggagagaatcctaaggccgacggaagaattgcagttaaggaactaggcaaattgaccccgtaacttcgggagaaggggtgcctgagaaatcaggccgcagagaataggcacaagcaactgtttaacaaaaacacaggtctctgctaaagcgaaagctgatgtataggggctgacgcctgcccggtgctggaaggttaaggggaacacttagcgaagtttcgcgaaggtgtgaacttaagccccagtaaacggcggccgtaactataacggtcctaaggtagcgaaattccttgtcaggtaagttctgacccgcacgaatggcgtaatgacttgtgcactgtctcaactgcaaatccggcgaagttgtagtgcgagtgaagatgctcgctacccgcgattggacggaaagaccccgtagagctttactgtagcttagcattgaatttcggtattgtctgtacaggataggtgggagactgggaaactagggcgtcagccttggtggagtcgttgttgggataccaccctgatagtattgaagttctaactggatgccatgaaactggtgacaggacattgttaggtgggcagtttgactggggcggtcgcctcctaaaatgtaacggaggcgcccaaaggttccctcagaacggtcggaaatcgttcgaagagtgtaaaggcagaagggagcctgactgcgacacctacaagtggagcagggacgaaagtcgggcttagtgatccggtggtacctcgtgggagggccatcgctcaacggataaaagctacctcggggataacaggctgatctcccccaagagttcacatcgacggggaggtttggcacctcgatgtcggctcgtcgcatcctggggctgaagtaggtcccaagggttgggctgttcgcccattaaagcggcacgcgagctgggttcagaacgtcgtgagacagttcggtccctatccgtcgcgggcgtaggaaatttgagaggagctgtccttagtacgagaggaccgggatggactgacctatggtgtaccagttgtttcgccagaagcatagctgggtagctaagtcgggaagggataaacgctgaaagcatctaagtgtgaagcccacctcaagatgagatttcccatagcataagctagtaagaccccttgaagactacaaggttgataggtcagaggtgtaagtatggtaacatatttagctgactgatactaataggtcgagggcttgaccaatataatcaagttgtaatatacattaaaattatatgcaattttgaaagaatagtatttctttcaaaagaaaatctcgtgatgatggcatagaggtaacactccttcccattccgaacaggaaagttaaggtctattacgctgatggtactgcatgggagactatgtgggagagtaggaagtcgcgaggtaagatggctcgatagctcagtcggtagagcagaggactgaaaatcctcgtgtcactggttcgattccagttcgagccaccataatggcgctatagccaagtggtaaggcagaggtctgcaaaacctttattccccagttcaaatctgggtggcgcctccaatttatttaaaatggtctatgtattaaccaaatggttagtgcataggccatttttgcatacatataataagttttatagaaagctataacttaaaattgaaataggtgtatagaaatactatagttagtgagctactaatagaacaaattaataaataatatagtacatgattgtattgaaataattggggttatatatttttctggactgcattggttaaattgatttactacaatcgcaaatgtaggccattattataagcatatattaaataaatttttaaattactttttaaattactttttaaagtttattgaaaaaggtttcaaagagtgctatactaaatttaaggaaaataaatattaggtacctatttttctaaaagctaatagacatgcatgcattattagattattaatagaaagtatatttatcgatatgataaatatgaataaaaactagtacagcattatttaaagaatgtaagagaaaattagcattgctagttatttttaccgaagtttcatggaagtcaaattataagtatactggacaattaatgtatcttttgtaaacgataaaaatagtcttccgaacgaagaaattttaggaatattataaacgcactaggaatatacgaatttaaatcaaatgaaataaaaaatgggagatgattttaatgaaaataaaaattagtaactctgtaatatatattttcgctgcacttagtgggcttttgtttggttatgatactggagttatttcaggagctattttatttattcaagaacaaatgcaccttgattcatggcagcaaggatgggttgtaagttctgtattattaggagctattcttggggctgcaatcattggtcctatgtctgataaatatggccgtataaagctaattcttacatcggctgttatcttctttgtgggcgcacttggatcagcatttgctccagaaatttggtcattaattatatttagaatcattcttggtgtcgcagttggtgcatcttcagctctaattccaacttatttagctgaattatcaccatctgaaaaacgtggaaccatatcaagtttgtttcagctaatggttatgagcggaattctattggcttatattacgaattatgcattttcagatttatatactggttggagagtgatgttagggttcgcagctattccagcagcagttcttttaataggcgcacttgtgttaccagaaagtcctagatttttagtaaaagatggacgagtagacgaagcaagaagtatactagaacatatgaataaacatgataaaagcgctgttaattatgaattagctcaaataaaaaaacaagctgagattaaaagtggtggagtcaaagagctatttagcgaatttgtacgtccggcattaatcataggctttggtctagctatttttcaacaaattatggggtgcaatacagttctttattatgcaccaactatatttacagatgtcggatttggtgtacaagcagctttacttgctcatattggaattggagtctttaatataataattactgctatagctgtagctattatggataagattgaccgtaaaaaaatgcttatttatggagctattgggatgggagtttcgctattgattatgagcatctcaatgaaattttctaatggttcatctgttgcttcgattatatgtgttattgcattaactatctacattgcttttttctcagctacttggggacctgtaatgtgggtgatggtaggagaagtatttccactaaatattcgtggcttaggtaattcatttagtagtgtaattaattggagtgctaatatgatggtatcattgacgtttccagcattattgaattactttggtacaggtagtttatttataggttatggtataatttgttttgcagcaatttggtttgttcaatttaaagtatttgaaactcgtaatcgttcacttgaagatatagaagctgaacttagatcatataaaggaggtgaaaaactccaaaaggatatctgcacacaagatgctacaactaaggcttaggtgataagagttgttataagatattataaaaaagatatgttagttaaacatatcttttttatataatataaaggcaacaagtccacaaatgccaacagttacgcccataactatagagaatgcatgtggattatctgcagataatggtaatgctatattcataccaaatattccacctattatagtcggtattgccataagaattgtaactgatgcaagcactttcataacaatatttaaattattagatattacagaagcaaaaaaatccattgtactggctaatatattactatagatttcagtcatttctatagcttgtttattttctataattacatcttctaaaacatctttatcttcttcatatttttgcataagctctaattttagcattttctctaaagtaatttcattagcttttaatgaagttgaaaaataaacaagtgacttttccagagaatgtaattgtataagctctctatttttcatagatttatgaagccttttttcaatcattaaacttttcttatcaatttgacgcaaataaagtaaatagtatgttgatattctatttagtatttgcaatgtgaatcttgattttttaaatgtataaaaagatttaattttgttattagcaaaatccgttaggattttactgttttttaagcatacagttatcaattgtttattagtatgtattattgataatgggtatgtatcataagtaagagagttatcctccatttcggtaaacggtatatccactattattaataatgaatcctcttcaatatcaatacgtgaagtttcttcatcatctaacgctgcttttaagaagtccaaagggacacctgttttcttagatattaatattagttcttcagcagatggagcaataagatttatccaagcaccattttctatcgtatctattaattttagggaaggatcaaattcactttcgcttttatagatttgaatcaatttatacacctcctaagcagtacaattaatattatactattataagatggtttgtaaacacatagcatttcttgtagcatcctattatttttattatcctgtaagtttaaggtggaatacaccaaagggttttaagtttaattttttatgatgctagaatctatgaagtgaaatatggtaccttaaaatataaatcaatataatatatggagtttattattatcaaaggcatatattatattatttttaagataccatatcttacaatttttttattagcaatttttattactaaagaattcagatttaacttcagagagcaaagtttcattctgtattaagtcaatagcagttaatgcaagagctgtagcagctatattgcattgctttaaagcaaattcagatgtagttgcttttgcgaaatcgaggcttccatatttaatatttttatcatctattatagatatatacggatgtatacaaggaaccttatgacttacatctccaatgcttaatcctgcatatatatcttttggtggattaatatttattattccactttctttaaggttatgactaaatagtctatttagggtcctattggttattagttccttattaggagactcatataagaaaaacttattaggaatatctattaatgctgttacattatttgcaatttttcttattttatcataagcctcatcagcagtttttgtattagatgcacgaatacaaaatttaatttcagaatctgctggtaatagcaatgttgtatacccaccattggatataaccgaatttatttctaaattatctggaaatcctttttttatagagtttaaaatattaagagttagtaaaacggcatctaacgatgtataagaattctgatttaaaaaacttaacttgctttcgctttcaaacttaagccctaatgggataattgcagatgaagagccactttcacatgtacatgtgtcagggtgtgctaccattacaacatctatgtcatcaaatagtccttgttttaccattgtccctttagttccgccaaagtattcgccggggcaacctaccagtattacagaacctccgatgtcatctataacacttcctaaagctaacgtcgcagatactgacattgcagtaaccatattatgcccagtaatatgaccttcattttcgatagcatcatattcacatagataacatattttgggatgaccttggcctttctttgctataaatgaattgttaatgtttaaaaaatttttatcaacttcaaatttgtatttatttaataaattgcatatgcaattagatgcgttaatttcactataacttttttcagggttctcatataaataagtacagagatttttaatatcatcagcacaagtagataaaaatgaaataattttgtttttcataagcgcaatttcttacttaaaacttgcaaaataaattactagatcttgtatatagtacaggttttgctttgttttacagtaagttctcctttcatattaatgtttttattgttaacatgataatagctgtattaaatataagcttaatatagctataactttaaatattatgagcaaattattatttgaaaatttaataatataagttatttttacaagctatatttacattattcaatttctattaaattcagcattaattgtgtaaatatatattgctctttattagtattaccagaaatttaaaaaatatctatatggaagttattaacatacagatggtgtataaagtctgcataattggtaataattttataagaatcataaaattaagggggaattactaatggaggatacaaataaatcatgttttttatgtggagcaagtgattgcgatggtataatattaaatggagaaaagatttgtaaagcatgtgaagagaaaattgttaatacaaatgtagaggatccagattatgattattataaggataatataaggataatcttatttagcgaacatgcttagaaattaaattcttacatttaaacgctaataatagaggggtactttaagatgaaaaaaggtttatttatagtttttgaaggtggcgagggaaccggaaaaacaacggcgattgacgcaatatatgattggattacagaaaataattttgaatgcataaagacgagggagccaggcggaattaaaatatcagagcaaataagacaagttattttaagcaaagataacaaggaaatggatcctaaaacagaagcactattatatgcagcggcgagaagacaacaccttgtagaaaaagtgataccagcattgaatcaaggtgtaatagttctttgtgataggtttatagattcttctttggcgtatcagggatatgcgagaaatttaggaatagaagaagttttaagtataaataaatttgctattggtgagtacatgccggatatatcagtgctatttgatcttgatcctaaaataggattggctagaatagctaataatgattgcagagaagtaaatagattagatatagaaaagttagagtttcatgaaagagttagagaaggatatgatattgtttataaaaataataatcatagaattgttaagatagatgtaaataatacgaaagaaaatgtaattaatcaaataaaaaatatactaaggcctaaaatatggacaaatataaactaagtaataaaaagccacctatttgtggtaaaataatatgtagtaaattattattagtttaagggtgggaattaaaatgaaattgataattgcaattgttcaggatgaagattcagcagatgttatagaggctttaacagaagcggattatagagttacaaaattagcaactacaggaggatttcttaaatctggtaatactacattattggtaggaattgaagaggaaaaagttgaacttgttattgatgttattaggaatgtatgtagaaagcgaaatgagacagtagtcacaccaactacccttgggggaagtgaaagtggatatatgcaacaataccctgtgcaaattagcgtgggaggtgctactgtattcgtaattgatgtggataagttcgtaaaaatatgatatcaaggagagataagcattgagaaagataatcggacataaaaatattatcgataatataaataatagaagacaaaaggattcattttctcatgcaaatctaataattggcaatgatggaataggaaaaagtataatagctaagtatctctcaaaccagattattaaggagagaaatagtgtagagagtgtagatattgtaaggtattctcctaattccaattcatttggtgttgatgatgtgagaaacattataagtgaagtcaataaaaagccttatgaaggtgataaaaaagtattaatattatataaatgtgacaagctaacagttcaagctcaaaatgcattattaaaaactattgaagaaccaccaagaggtgtacatttaatattgctaagtgattctttagaagtaattttggataccataaaatctcgttgccaaatatataggttaacaccattaaataaggaagaaattttaagttaccttgaagaaaaatataatagtttaagtgaagatgataaaaaagccgcattagcttatagtgctggaatacctggaaatgtagatagattttttagcgatgataagttgagaaatttgagagatatatgtatagaattatttgaagatatcgtaagtagacaaaaaggtattatattaaagtatgaggaattattaaaaagtgcaaaagaagataaattagagttattaaatatacttctatcatatataagagatatcttacttcttaaagagcttaatgatagtgaacttgttgttaattttgataaaatatataagataaaaaatatatcaagaggaatgtcttataagaaattaaatagtatgttagaatacataaaagaagctagaataaattttaatagtaatacgaactattcaatggtcataagtgttttgcttatgggctttgcggaggtataattaatgataaaagttataggcgtaagattcaagaaagcgggaaagatttactactttagtccactagaattagatataaaaaagggtaattatgtaatagtagagacagctagaggtatagaatttggtgaatgcgttataggaattaaggagataaaagaggaagatatagtatcacctttaaagaatgttattagaattgctgatgaggatgatattagaaaacataaagaaaataaagataaagaaaaagaagccttagatatatgcttagcgaaaattcaagaacataaattaaatatgaaattaatagatgttgaatatacatttgataatcataaggttatattctactttacagcagatggtagagtagatttcagagagttagttaaggatttagctactatatttaaaactagaatagaattaagacaaataggagtaagagatgaggctaaaatggttggaggacttggaccatgtggtagacctatgtgttgctctacattcttaggagactttgcatctgtgtcaataaaaatggcaaaggaacagaatctttctttgaatccaaccaagatatctggaatatgtggaagattgatgtgctgtttgaactatgaacaaactacatatgaaggtataagaaagagattgcctaaggtcggctctattgttaagacagaggctgggaatggagaagttgttggtaattcaatagttaaagagatggtaaaggttaaggttagaagaggagacgaggaagttgttgaggaattcaaaataactgatgtagagctcgtttcaggaaaatatgaagatacaattgatgaaaataatataaaattgattgttgagtcagaagaagataaaacattaataaaaaatcttattaatgaaaaataggaggaatttctatgaaatctgttattaagatttgtaatatggagtctaatgacgatgccaagataattcaagatacagttgttaagaattcgggggtaatagctactgaaatttcgcttgcaaaaagggagataacagtgatatataatgatatctttttaaaactcgaaaggattataaattccatagaggatttaggatatgttgttttgtaatcgtaaataatataacaatattaaaaaataagaagtctagaatacaaaacacttttaaaacatacgaatacgtgttaaaatgtaagaggttaattaccacaatttattaggaggtgttctagatggcatttgttattaatgattcatgtgttagctgtggagcatgcgctggagaatgtccagttagtgctataactcaaggagatactcaattcgttattgatgcagatacttgtatcgattgcggaaactgtgctaatgtttgcccagtgggagctccaaaccaagagtaataaaagagagatcgtctttaggcggtcttttttttattgtctaggaaagtatagaattttttgattttgaaagtcagtgataccaatggttataaggatattggcttgtaaaaagtggtatcaagaaagagcgtggcgcagccactttgttctttacatatagttaaaatagttatgttcactatttatatggaggtgttaacaagatacattcagacttaaggctagaatttatatccaagtcagaagtatctaatatattagaatttattttttttatgctcttcatagatattataaaattcttaggatcatctaagtataaagatgttttattagttttataatgcataggaactatgtattttggggaaataaggttacaaagtttcgcagactcaaaaccatcgagagtaaaatgtccaccaattgggataagtaaaatatcaatatttttaagcttttctaaaatcaatgaacaaggtatatggcctaaatgtcctaaatggcatatagaaagtttatcatccttaaatatataaataatatttgagcctctttttagtccattgcatttatcatgaaatgagtcaaatccttctatgctaaggaagtttaggttaaagtttccactctcattaataatcttggttgtattatttatatcattgatatatgaactatcaaaatggttatgactaatggtaatcaaatctgatttaggaaaattattatcataacctaaattgttgctaaacggatcgattagaattcttttaccaatggatgttttcataaggaaacaagaatgtccataccaaataatttgcatataaaacctccataaattaaaatatattagatattattaacatacagtattataaataatcataaatttatattgatacttcaaaaagtaaaagaagtatagtataatattataaagtcaaagtaagtcaaaaacaaataattaaataaaggtttaagcaggtgatgttatggcaagactttcagatataatagaagagtttataaaacaaatgtttaatgagaatagagataatgtgatttttatacaaagaaatgagttagcagatcagtttagatgcgcgccgtcccaaataaactatgtattaacaactcgatttacttatgaaagaggatatttaattgagagcaagagaggcggtggaggtcatatagcgatcaagcagttggatgaggataactccaatagaagggaagagctaattaaccaaagcataggagaaacaataacatatcataatgcaaacgcattgcttaatcacttattagaatctggagttattgaagaaagagaatgtgaaataatgaagatagcaataaatgatagaagtttgacttcagcagataataaaaataaagtaagagctgatattttaaaagctatgattatgataattttatcttaaaggtggggatatatatgttatgtgaaaaatgtaaaaaaaatgaagcaaagataaatttaattacagtgatgaatggtcagaaacaggaaatttggttgtgtgaaaattgtgcaaaagatatagctaatattccgttctttagtccaataatgcaaaatataaatgttccatttcaaggcatacttacagaaatattatctaatgtagataatggtaaatcaaatatagataacaataaagtaaaagaaattatttgtccaaattgtgggttaacttatcaggaatttaagaaatcaggaagattgggatgtgctgattgttataaagaatttaatattgtacttgagccaaggataaagagcttacaagttggaactaaacatattggtaagattcctaaggtgaagggaaaggaattggttcaaagaaaaaaccttaaggatttaaaagaagagatgcaaaaattgatagtagccgaggaatatgagagagcagcaatagtaagagatgaaattaaaaaactagaattatatatattagaaagtaacactaaggaaattacaaatagaaaggagggaaattgtgatgaatagctgggaagatgataaggaaaggcttggagtagtattaagtagcaaagtgttgttagctagaaactttagtaatttaccttttcccaataaactgaattatattaagggtagagaaaatggcaaagaagtatataacgttcttaaaaacgaattagataatgaagaaattacgttatatgagatttggaatacaaaagaagaatttagtaaacaatatttagaaagggatttaattagcaaagagcttttgaaaaattctgataagggttcatttatattgaataaagaagaaaatcttagcattatgataaatgaaaaagatcatataaaccttcaatgtataagtgatggatttaaattagaagaaatttttgagagagcaacagttattgatgataagatagaagaaaattttgactatgcttttgatgaaacattaggttatttaacagcatcaccagaaaatatcggaacaggaatgaaggcatcagtagtattacatttgccagctcttagtatgagtgaagaaattagtaatatatccaaaaaacttggtaagttagggatttctataaaaggagtccatttagatggcacaaaagtttttggaaatttatacagaatatttaataaagtgtcattaggtttgacagaggagaatattataaataaattaaaaaaagcagtttggagcataataatagaggaaaataaattcagagaaatattacttagtaaatgtagacatgaattagaggataagatatatagagcatatggaatactgagatatgcaatgattttagattttaaagagtctattgaactattatcaaatgttagattaggagcggaattatcaattataaatattgataagtgtaagttagataaactatttattctaattactaattcatcccttcaaaattatttaaaaaaatcactagatgataaggaaattaagtatgaaagagctaaattagtgaaagaaatattaacctaaggagaagataggaggtttaaggtatatggaatataataaattaacagaaagggcacaagcggtaattttagaagctgaaaatgaatcagagaaatttaaacatgggtatgttggaactgagcatatattacttggtatattaaaagaagatggatattctgctaaattattaaaaaaatatggggttaatagtgaaaatattagaaatatgatacaaagatacttgggttatggggatatcaaaaaaacagatgataatattttgctgacccctcgaactaaaaggttaatagatgaaagttttgcagcagcaaaaagattaaatcataaatatgttagccctgaacatattttattagccttacttaatcaagaagaaggaatggcatacactatcttaaaaagtttgaatcttaacttcactattataagtgaagaattacttgtatttttatctggtacttatgaagataaagctagcgataaaaatacaatggataataagaaagctaatactccaatgcttgataagtatggaagggatttaacagtactatcgaaggaacaaggactagaccctgtaattggaagggataatgaaactcaaagggtattagaaattctttgtagaagaattaaaaataatccgtgtctgattggagaaccaggtgttggtaagactgctgtggttgaaggactagcacagagaatagtggagggaaatattccagagatacttagaaacaaaagagttgtttctttagatttaacttctatgattgcaggagctaagtatagaggtgaattcgaggaaagacttaagaaaaccatggatgaaataattaaagataaagatataattatttttatagatgagattcatactattataggagcaggaggagcagaaggtgctatcgatgcatctaatatattaaagcctgctttagcaagaggagagattcaatgtataggagctacaactatagatgaatatagaaagtatattgagaaggattctgcactagaaagaagatttcaacctgtaacagtaggagagccttcaaaggaagaaacgctaaaaattcttaaaggattaagagataagtatgaagctcatcatagagttgaaataacagatgaagctttagaagcggccgttaatttggcagataggtatataacagatagatttatgccggataaagccattgatttgattgatgaaggagccgctaaagtgagaatccaaagtttaacagctcctccagatttaaaagacttagaagaaaaaattgaaaatataggtaaagaaaaggaagaagctatacgagttcaagattttgagagagctgcgaatttaagggataaagagagaattttaaaagagcagttaggtaatatgaaagatagttgggatactcagaattctataaagacactagttgtagatgcagaaaagatagcgagtgtagtatcatcttggactaagattccaattcaaaaattaactgaatcggaaagcgaaaggttattaaaattagaggaaatattacacaagagagtcgttgggcaaaatgaggcagttaaatctatagcaagggctgtgagacgggcaagagttggaataaaggatcctaatagaccaataggaagttttatattcttaggaccaactggagttggaaagactgagctttctaaagcacttgcagaagctatgtttggtgatgaaaataatattataagaattgatatgtcagaatacatggaaagtcattcggtatctagattaataggatcgcctccaggatatgtaggacatgaagaaggtggtcaacttacagaagctgttagaagaaaaccttattcaatagttcttttagatgagatagaaaaggcaaatccagaggtattcaatatattgcttcaaattatggaagatggaagacttactgatggtaaaggaaagatagttaattttaagaatacaataattataatgacttcaaatgttggtgctcatcaaattaaaaaacaaaaaagcataggatttagtagtgttacttctaaaaacgaaaatgaaactgaatatgaaaagatgaaggaaaatatattaggggaactaaagcaaaaatttagaccggaatttttaaatagaatagatgatacaatagtattccacaaattgagtgatgaagatttaaatcaaattatagatttaatgcttgcatcaataagaaaaaggcttgaggacagagatatatacttaaactttgaagataatagtaaaaagttcctactaaacaaaggaattgaccttgattatggtgcaaggccacttagaagattgataataaaagaggtagaagataaattaagtgaggaaatattacaaggaaatataagaatcggagatagggtaaaggtaagcgagttagaaaacaaacttattttcaaaagattggctgaaagcaatttggagctcaataagaattaatttatgttaatgggctatttcaacgctataaattatttatacattgaaatagtccgtttagcttaaagattaatatttgggtattgagtagtttaaaatgtattaaatagtaggagaaaatagatatgagtaaagaaaaaaaggaattggatttaattataattgggggtggaccagcaggtcttacagcagcaatgtatgcaggaagggcaaagttgaatactttgttgttagaaaatgaacttgtgggaggtcaagttagaaatagttatactatagagaattacccaggatttaaaagtataggtggaggagatttagctgacatatttcaagaacaagctagagatcttggagcaaatattgatgaatttgattcaattgaaaagatatatatatcagatgatgaaaagattatagaaactgaatcatatgtataccaacctaaagctgtaataattgctacaggagcggcgccaagaaaactgcctattcctcaagaagaacaattttcaggaagaggaattcattactgtgctatttgtgatggagcactttatcaaggcaaaaaagttgctgttgtaggcggcggaaattctgcactagaggagtctgtatttttaactaggtttgctgaaaaagtgtacttaataagaaggtatgattattttaaaggagaacagtcattaattgatgaagttttcaataatcctaaaatagaggttctattaaataaggatttaattcaggctaatggtaaggaatttttggaatcagttatcataaaagatactaagactcaagaaactagtagcttagatgttaatgcagtttttgggtatataggaacagagcctagaacaaaagaagtaaaggattatataaaattgaatgagcaaggatatataattactgatgaagatttacagacaaatattcaaggagtatatgcagcaggggatgtaagacaaaagaagtataggcaaataacaactgctgtatcagatggcacgattgcgcttttaaatgcggaaaagtatatattacgaaaaagaaaatagcattaagcatggaaacaaaagtcagatattaattgatatatgccaaaataattaagaggcgcatatacgcctcttaattatttacctaaagcctttaaaatagcaggcttatcaaagcctataataatattatcattaatatctaatactggtacacccatttgattagacttttttatcatttcttctctagcttccatatcatcttgaacatttaattcttgaaattcaatattttctgatttaagaaaactttttgctttaacgcaccaaggacaagtattggtagtatatacttttaccataaatgaatacgcctccttaataataattattatattgtaattaatattataatatagattttataatcattcaatataactagaaaataatgagtttattacaaattaaactataatttggttatatattgttgtctcattattagaataatcattatagagtaatttcgttaatacataactagtgaattatattttatatttattttctagtgttgatattaatattatgatttctatttattatatatttgctcctcgctaatttattttataatagcttttgcaataatttattaaatattctaagaacaaaaaataaaatagttataaagtattatatataatgattgaatgaaggttaaaaactagctatatttgattcaaaatatatgagtaagaaagtaatatgatataatataattaagatttttattaaaaaagtaagatgtaataaagatctagaaacgaagggagaggtttatgaagaaaaaaacattatatagatgtaatagttgtggttttgaaagtataaagtggcttggtaaatgccccacatgcaatagttggaatacattagaggaaattactattgaagcaaaaaatttagagaccagatcaagacaagtagcaaaaaagccgttaaaaaaactttttgagatagtttccaataaaagcgatagaatagtaacagggataaatgaatttgatagagttatgggtggaggaatcgtaaaggattcaatttcgattataacagcaagaccaggagcgggaaaatcaacacttcttcttgaaatttccgatgctgtcgcccaaaagggatataaagtaatttatgcgtcaggggaagaaagtgatagtcagataaaaaatagagcagatagaattcttaataaaatccacgaagatatatgggtactacaagaaacaagtcttgataatgttttagatgcggttgaagaaatagatccagatattataataatagatagtatacaaacatttactatggaatcatctttgccagcgagagcagggtcacctacacaaactatggaatgtgctaatgcattgcttcaaatggctaaaaacgataaaaggccaagagcggttataatagttgggcagatgactaaaagtgatgaacttgcagggttaagagcattagaacatttagttgatacggtgcttataatagaagatgatagtgatgaagagttaagagtacttgtaagctctaaaaatagatttggtggtattgaaaatggcttctttcaaatgggagagagggggattatttcaatagataatccatcagaattttttatgacaaagcgtgaagaaggagaaattgtatcaggaagtgcattaaccgtaattaaagaaggaacaagagcaataataactgaaatagaaagtttagtatccaagagttttactccatatcctacaagaataggagaaacattaggaaaggataaattaaacactttgatatctatacttgaacaacgtggaggaattaatttatacgataagaatgtaattattaaaactacaggtggtataaaaataagagaacagggcattaatttagctgtaataatgagtatagtatcctcagtaaagcagcaggggatagaatccaatatagcgtttatagcagatgtaggactgactggagaacttaaaaaagtaccatcattagaaagtagaattagggaacttgagagaatgggatttaaaaaggtttatgttccaaaagattctataggaaaaagcagcagtttgaagaaaatagatataattgaattaaagactttgatagatgtaataaataatgtttatagaagttagaacattatagaaatgacatattaaatatgaagagaatagagctatttcttacaaataaatatattataacttaaattttacaaatgttgttgagggattatatttattatagtattatagtttctagggcctaggttaaatttactctgaaaataatatcagtcaaaatgttcaatatttaattttaaataaatctagaaaagtatcaaaatgatttttaaagaaaatgggtgagtgtatgagaatagaaaagggaataggaataaagaatgtcttaaagataatgtgcccaggcactcaactaagggaaggtcttgaaaatatattaagagctaaaacaggtggattattagtgattggtgacgatgaagaagttatgaaactcgttgatggtggtttttatattaatgcagagtatacaccatcatatgcatacgaattagctaaaatggatggagctatagtcataactggagatttaaagaaaatcgtttgtgctaatgcgcaattaatacctgattcatctattccaacatatgaaacaggaactaggcatagaacagcgcatagagtagctaagcaaacgaataacatagtaattgcaatttctcaaagaagaaatataataactatgtacaagggtgatataaagtatgtattaagagaaagtagtgtaattcttggaaaggcaaatcaagcgcttcaaacactagaaaaatatgttgcagtacttgaacgtgttattaataacttgaatttattggagtttcaagacttaacaacactattcgatgtagttacagcaattcaaagaactgaaatggtaatgagaatagtggaagaaattaatatgtatatactagagttggggaatgaaggacgattaatatcaatgcaattaaatgaattagttaagcatatagaaagagatggaatattgctaattagagattattgtaaagatggacttcaatataacgaggtatatgaacacattcaaaaactaaattcttcagaattattagaattagacgcagttgcaagaacattaggtcgtggaggaattccgcttatggatacattaatatctccaaagggatatagaatgttgagtaaggtgccaagaataccatctaatgttattgataatcttataaaagaatttgaagaattaagtaatataattgatgctgatataaatgacttagataatgttgaaggaataggagaagcgagagctactgccattaaagatggattgaaacgtataaaagagcaagtctcattaaaaaaggaaatatgataatttaatttatgttaaattaaattgaatttagtttatacagagaaaaaggcatttattttgatttattgatataagatttaatctgattttttaaacttgaatgaaattattagtaaacttaataatttattcattttagaggtacttattgtatgatataattaatatgatttagagaaatattgaaaatatgattaaaatactatctaattgtaaataattagaaggaggtgaagtatgtgttaaaaagactattaaggggaattttttctgtaattggattgatactgggatatttcatatctgaaatattacttacaatccctcaggttgataatttaacttacatttcaaccactattactagagttttatttattattatcatatcttttatttttggacttatattttatattatttctcctattatatacaaaggaatttctaatttaattgagtatattgaaaagagtatgcaaaaaatgagcataactgaaatcatttatggaacttttggagctgtaattgctttaattcttatgacgtttattgcaaaaccgataaatgatataaatataattgggccaattttattaattttattaaatgtgttagctgctataataggtgcagaaataatgattaaaaaaaaggaagatataacagctcttcttgttaatatgaaaaagcctgtaattaaagagaaaaaagttaaagaggtaataaaagaatctataaaaggaattccaaaagtattagatacatcagttataattgatgggagaatatttgatatttgtgagactggatttgttgaaggaccactggttatacctaactttgtactggatgaattaagacatatatccgattcttctgattcgctaaaaagaaatagaggaagaagaggtctagatatattaaataaaatacaaaaagagctagccatagaaactcaaattgtagaagatgattttcctaaaatcgcagaagttgatgcaaagctgcttaagcttgcacaaaaaatggaaggaaaggttataactaatgattataatctaaataaagtggctgagtttcaaggagtaccagtattaaatataaatgaattatcgaatgcaataaaaccagtagtgttacctggtgaagaaatgacgattgatatagtaaaagatggaaaagaatcaagccaaggtgttgcgtatttagaagatggaactatgattgttgttgaaggtggaagaaaatatataggacaaacaacaagtgttatagttacatcagttcttcagacagcagctggacgaatgatttttgcaaaaccaaaagataattaaaagttaaggagagttttctgtatggttagtgcgatagtattagctggaggcagaggtaagagaatgggctatattcaaagcaagcaatatattgatttgaatggtgcgcccattctttattacacgttaaagcagtttatagaaaatgatttgatagataagatcattttagtagtgcctgaagatgaaaaagattattgtaaaagagaagtattaaataaatatggattaaaaatagatgatttagtatctggtgggaatgaaagacaagaatcagtatataatgctttggagaaattagaaaaatctgatatagtattaattcatgatggagctaggccatttgtatctgagaagataataaatgatgcggttgaatatgctaagcgttataaagctgcagcgcctggagttatgccaaaggatactataaaaattaaagatagtaataatttttcagtagatactttagttagaagtgagcttgttgcaattcaaacaccacaagcttttgatttcaatctaatatatgaatgccataaagaaataaagaaaagatgtatatcggttactgatgatactagtgtagtagaacttttgggacataaagtttatatttatgagggtgattataaaaatataaaaataactacaccggaagatttaatacttgcagagtattttgtgaaaaatatagtatagtgataatgtattgacaggctaaattcaggaagttataatatattaaaataaaatttaattaagattgtaaaacgttgatgaagaatagtagaagtcgattatataagagaaaaagtccgtgggctgaaagacttttaaacaggctttgaaccagcttttgagtatagggaaaaactatcggtctaaaaccgttatcattgctagagaacaaatttaggtggtaccgcgatataaagttcgccctaatatatattattaggcgggcttttttattttatgctttagcatgtaagaaaaccacctgctaagcgggtggtgggtgtttggttataccgttaaaaactatgagtattctaaaaaaatgcttttaccacaaactctgtgctaccactaaactaatactgttaatgcgaaactataagttacgaaaaaacttaagtttgataactgcatttaaaatatagaataaccacacaattaaaaaatatatagcaagtctaacagcgagaaaagactgctctatgtattttttagccttacaggcgcagagcaagccacccgtttgacgggtggtcctgacttatccaattatatatttttaatctattaattatttataaaatctaatattcagattttattacatcatatataaaatattatttgcaatttaaccaatattattttaggaggaacaccaaatgaaaatgtctaatatgttaatatcaacattaagagaagtaccagcagaagcggagattgacagccataagcttatgttaagagctggaatgataaggaaaatggctgcaggagtatataattatatgcctcttggattaaaagttttaaaaaaagttgaggatataattagggaagaaatgaatgcagcaggtgcgcaggaatttctagcatcagctattattccagccgaactatggcaggaatctggtagatgggatgcatatggagcagaaatgtttagattaaaggatagaggcgatagagatttttgcttagggccaactcatgaagaagtatttacagatatagcaagaaatgaaattaagtcttacaagcaattacctcttaatttatatcagatccaaacaaagtatagagatgagcgtagacctaggtttggggtgatgagatctagggaatttgtaatgaaggatgcttatagctttgataaagatcaaggtgggctagatttagcttatgataaaatgcatgatgcatatgtaaaaatatttaatagatgtggtttagatgcaaaatgtgttgctgctgattctggtgctattggtggttcaaattcagcagagtttatggttaaatcggaagttggagaggatgatgtggtattttgcagtgaatgtaactatgcagcaaatatcgagaaagcttcatcaccagcagagaaagagttaaaacaggaattcaaggaaataaataaagttgagacacctaatacaaaaactatagatgaattagttgagtttttcggtactaatgaaaaaaatttcgcaaagactattttgtttaatgcagatggcaaaatagtagcagttatggttaggggggatagagaaattaatgaggttaaggttagcaatgcaattggggaagtgattaacctagatcttgctagttcagaagatgtaaaaaaggcaacgggagcagaaataggatttgcgggaccgatagggataaaagtagatatgctattagtagatgaagaagtagctaatatgtataactttattgtgggtgctaatgaaacaggttaccatattaataatgtgaattatggaagagactttgaaggtgtaataggagattatagaaacgtaactgaaggtgaaaagtgcccagtttgcggtggtaagattactattgcaagaggaacagaagtagggcatatatttaaacttggtactaaatattcggaagccatgaatgctaagtttatagatgaagatggaaaagaaaagccatttataatgggatgctatggaattggagttacaagaacaatggcatcgataattgagcaacatcatgatgaaaatggaatagtgtggccattgtctgttgcgccataccatgtttctgtaattcctgttaatgtaaaagatgaggaacaagctagaattgcaaatgaaatttacgaaaagttaacaggtgctggaatagaagttcttttagatgatagaaatgaaagagcaggagtgaaattcaaagattcagaattaatgggaataccaatgagaataacagtaggtaaaaagattaatgatggagaaattgaatttaaacttagagatggagaaatggaagtaatcaaaatagaagatgtttataatataataaaaggtgaatttgagaaaaacaatataaaactaaaataattttaggaggtaaattaatgagggtatttaatactttaacaagacaaaaagaagagtttatccctattattcctggcgaagttaaaatgtacgtctgtgggccaactgtatataatttctttcacataggtaatggaagaacatttattgtctttgatactataaggagatatttggagtatagaggatacaaggttagatttgtccaaaactttactgacatagacgataaaatgattaataaagctaatgatgagggaattacagtaaaagagcttggagataaatatataaaagaatactaccaagatgccgattcattaaagattgaaagagctactgtaaatcctagagcaacagaatatattcatgatataatcaaatttgttgaagagttgattgaagcaggatttgcttatgaagttgatggtgatgtttactatagcacaaaaaaatttgataattatggaagattggtaggacagaacttagatgatttgcaggttggtgcaagaatatctgttgatgaaagaaagaaagatcctatggattttgcagtatggaaagcacaaaagccaggtgaacctgcttgggaaagtccttggggacctggaaggcctgggtggcatatagagtgttcgtgcatggcgaagaaattgttgggagatacaatagatattcatgcgggcggcatggatttaagattcccgcatcatgaaaatgaaatagctcaaagtgaagctctaacaggaaaaccatttgcaaattattggcttcatgcagcatttgtcaatgtagataataagaaaatgtcaaaatcattaaataacttctttacagcaagagaagttcttgaggaatatagttcggattcaataaggtttttgatgttgtctggacactatagaatacaaataaatttcactaaggaacttttagattcagcgaaatcatcaatagaaagattatataattgcataaataatcttgaaaatttgaaagatgaagtcactaaaaaattaatggatgaagaggaagaaaaatatctaaagtctttagataaatatagagaaaaatttattgagaagatggatgatgattttaatacagcagacgctatttcggtattgtttgatttgactaaagatattaacaataatgtgaatattaattcatcctctgaattatgtgagaaagcggaatcagtagttagagaactaggaaatccgctaggtatacttcaagatcgtattgagaaggatttggaaacagaaattcaggagcttattgaaaagagacagcaagccagaaaaaataaagattttgcacttgcggataaaataagagatgatttaaaaagcagaaatataattttagaagatacaccacaaggtgttagatggaaaaagattgattaattaaagaaagggttgcatttttgcaacccttatttaaaggagaattataatgttagatgatttaagaattagaaaattttcaaaggatgaagcacgaatgttgaattcattacaattggcattaataggtgatggtgtctttgaagtttttattagaaattatattttgactcaaaatacagcgttatctgcaaataagatacatgtgaaggcaattggatatgtaaaagcaaaaagtcaggcgtgtataatgcatgaaattgaaaatctcctaaatgaggaggaagaagcagtttacaaaaggggaagaaatgcgaaatcacctactgtccctaaaaatgcagagataagagattatagaatggcaactgggtttgaagcgttaattggttatctatacttagtaggtgataaggaaagattagaatttatatttaacagaagtattgaaattattaattagtttataaaattaaaaaaaggagggtttataatgaatattaaaccgaaaaaaaatatttcaagtggcaagtttatggaaagcaaagataaatatgtaaatcaatcaaaaggtaaagttaaaagctataatgaggtaaaaaataaaacgaagaaagataatatagtaggaaatgataaatcaacgggcgctattgaagagagagaagatatagttattggaagaaatgccgtaattgaagctctaagaggagaaagaacgatcgaaacgctatatatatctaatagtaaattagaaggttcaataaaaactattgttggtttagcaaaagaaaataggatattaataaaagaagtggataaaagaaaacttgattcaatgtgtggtggagaagtacatcaaggggtaatagcaaaagttacgccatataaatattcagaagtatcggatatattggatttagcagagaaaagaggggaagctccgttcatagttatattggatgagattgaagatccgcataatttaggatcaatagtaagaactgcagaattatttggagttcatggaattatacttccaaagagaagaagtgcatctgtaagtacaactgtttataaatcttcagttggagcaatagaacatgtaaaaatagctaaagtaacaaatttaaattcgacaatagaggagctaaaagaaaagggaatctggatctacggggcagacataagagcagaagaatatagttatcaagtagattttggaggaccttgtgcggttataattggaaatgaagggagaggcatttcgaaattaacggtggaaaagtgtgataagctaataaaaataccaatggtcggaaagattaactctttaaacgcatctgtagctggtggtataattatgtatgaagttttaaaaggacgattgaaatagaaagaggtacatcgtgaaaactatttttgtagatggatataatgttataaatagttggcctaatttaaaacaaaaaaaagattctagctttgagggtgcaagacaaactcttatagatactttacataattacggagtttttaatgcttgtagaataatactagtatttgatgctcataaagttactgggagcattgaaaagagagaagagataaatagaaatatatcggtagtatttacaaaggatggagaaactgcggatagttacattgagaaacaagtaaatgctctgggaaggaaacatgaaatagttgttgtaacatctgatagtttagagcagcaaacaatttttcaaagaggtgccgttagaatgtcatctttagaattttataatgaggttctaaggatagagaagtctataaaaaataaagcagataagaacagaatttcacaaaaaaatataataagtgataatatagatgatgggatagccaaaatattagaagaaatcagaagaagtaagtaaattcagttgactaacataattttactggggtataattgtctaaacgagtggttagtttaatgcagaagagagttgagaataagcagttgaaaggttttttagatttcaaagataaatcagacgaagaagttgttgcgaaagctaaaagtggtaatagtagggcgcaagaatatttgatttcaaaatatgagaactttgtgaagtcaaaggctaaatcatattttttaattggagccgacaaggaagacatttatcaagaagggatgataggtttatataaggctatcagagattttaatgcagaaaaatcaacatcatttaaagcctttgcagaaatatgtgtaataagacaaataataactgcaataaaaacagctactaggcagaaacatattccgttaaatacttatgtgtctttaaataagccaatatatgaagaagaatctgagagaactcttcttgatgttttggcaggattgaaaatttcagatcctgaagagctaatgattagtaaggaacagatggattatatcgagaaaaagatttcgaaagtgttatcagatttggaattagaagttcttacttcatacctcgatggaaagtcttatcaggagattgcaagtgatttagaacgacattccaagtctatagataatgcattacaaagagtaaaaagaaaattagaaaaatgcttagatttaaagtgataatttatattgacaaataaaaagaataatagtaaactttataattggtatatcaaagaagatagcaattttgaacgctcacatagctcagtcggcagagcgtcaccttggtaaggtggaggtcgtcggttcgattccgattgtgagctccaaataataaaaaataaaaaaacactaggccaagtttattagaagataataagggaggaaaattataatggcaaaagcaaagtatgaaagaagtaagccacacgttaatattggaacaataggtcacgtagaccatggtaagacaacattaacagcagcaatcacaacagtattagcaaataaaggatatgcagaagcgtttaactatgcagatattgataaggctccagaagaaaaagaaagaggaatcacaatcaatacagcacacgttgagtatcaaacagaaagcagacactatgctcacgttgactgtccagggcatgctgactatgttaagaacatgattacaggagcagcacaaatggatggagctatcttagttgtatcagcagcagatggtccaatgccacaaacaagagaacatatactactaggatcaagagttggtatccaatatatcgtagtattcttaaataaagcagatatggtagatgatccagaattattagaattagtagaaatggaagttagagaattattaagcgaatatgacttcccaggagatgatattccagtaataacaggatcagcattaaaagcattagaaaacccaacagatgaagaagcaattaagccaataatggacttaatggaagcagtagatagctatatcccaactccagaaagagcaacagataagccattcttaatgccaatcgaagatgtattcacaattacaggaagaggaacagttgcaacaggaagagttgaagctggagtacttcatgtaggagatgaagtagaaatcgttggattaacagaagaaaagaagaaagttgtagtaactggaatcgaaatgttcagaaagttattggatgaagcacaagcaggagataacatcggagcattattaagaggagttcaaagaactgatattgaaagaggtcaagttttatcaaaaccaaattcagtacaccctcacacaaaatttgtaggtcaagtatacgtacttaaaaaagaagaaggtggaagacatactccattcttcgatggatacagaccacaattctatttcagaacaacagatgttacaggatcaatcaaattaccagaaggaatggaaatggtaatgcctggagatcacattgatatgaacgttgaattaatcactccaatcgcaatggatgaaggattaagattcgctatcagagaaggtggaagaactgtaggttctggagttgttactaaaatagtagaataagatacatttattactaataggactaagttgtatgacttagtcctatttaaaggatgattgacaagtcaaatattctatgatattgtataaaagtgacattttaagcaacgtaaattttagaagtgaataggaactcaagattcctatttaatatataagaaaactggaggtgcagtcatgagaacaaaagtaactttagcatgcacagagtgtaaacaaagaaattatgattcaatgaaaaacaaaaagaatgatccagatagattagaaatgaaaaagtattgtaaattctgtaaaaagcacactcttcatagagaaacaaagtaattagccgaagtaatgacatatagttattaaatttaaggatgtgaagatatgtcagcaaagaacagtgtaaaaactgaaaaaactattaaaagtaatggtttgtttggtttttttcgagaggttaaggtagaggttaagaaaataacttggccttcaaaagatgagacaaagaaagcatttgttgcagttattgtgttcacactaatgtatactatattagttggtggattggattctattttcaataacctctttaaaatgattttaaatttcaagtaaaagggaggtttgggtgattttatatcgcctgacgaatatgagtgatagagcacgatggtatgtagttcatacatactcaggatatgaaaataaagtaaaagcaaacttagaaaaagcaattgaaaatagaaatcttgaagcattaatccatgatatacaagtacccatggaagaagtggttgaagaaaaagatggaaagcaaaaagtctcattaaagaagaaatttcctggatatgtgcttgtaaaaatgttaatgggtgatgaagcttggtacgttgttagaaatactagaggcgtaacaggatttgtaggcccaggatctaaaccagttcctctttctgatgaagaagtggaatcgatgggagtgttagaagttcctgttgagattgacttagaggtaggggaaagtataagaattatctctgggccattgagagattcagtagccacaatacaagagataattccagataaacgcaaagtgaaagctttagtggagatgtttggcagagaaacacttgccgaattagactttaatcaagttgaaaaattagtttaactataatgaactaattttaattaagtgggagaactaaaaagagttcgttataccacagtaataggaggaataacaaaaatggctaagaaagtaactggaatgattaaacttcaacttcaagcaggtaaggcaacaccagctccacctgtaggtccagctttaggtcaacacggtgtaaatataatgggattctgtaaggagtttaatgcaaaaactgcaaatcaagctgggtatataataccagtagttattacagtttaccaagacagatcttttagttttatattaaagactcctccagctgcagttctaattaagaaagaaataggattagaaagtggttctggagtacctaataaaacaaaggttggtaaattaactcaagatcaacttagaaagattgctgaaactaagatgccagacttaaatgctgcaagtgttgaatcggctatgagaatgatagcaggaacagctagaagtatgggcgtaactattgaagagtaattcgtaaaaataagtgggaggtcaaaaccgttaataccacagaggaggcaaattatgggaaaaaaatatattgaaagtgcaaagcttatagacaagagcgcattatataatccagtagaagcattagatcttacattaaagactgcaaaggcaaactttgatgaaactattgaattacatgtaagacttggagtagatccaagacatgcagatcaacaagttagaggtgcagttgtattaccaaacggaacaggtaaaacagttagagtacttgtttttgctaaaggagataaggctacagaagcacaacaagcaggagcagatttcgttggagcagatgaactagttcaaaaaatccaaagcgaaaattggtttgattatgacgtagttgttgcaacaccagatatgatgggtgttgtaggtagaattggtagagtattaggacctaaaggactaatgccaaatccaaagtcaggaacagtaacatttgatgttgctaaggcaattgaagaaattaaagctggtaaagttgaatatagagtagacaaaacagcaatagttcactgtccaattggaaaaaaatcatttggaactgaaaaattaaaagaaaactttactgcattaatggaagctttagttaaggctaaaccagcagcagcaaaaggacaatacttaaaatcagtatctgtttcaagtacaatgggaccaggtgcaaaagttaatcctacaagagctttagattagtattgacttaagtgaaattatgtagtataatttcaaatgttgtaaaaagaaaatattttttccgtagacagtgggtgcgaaagcgtaaagagtaactgcccgcctaggtgtatataatagattatattataggccttccatgtctgcggaaggtcttttttaataaaagaagcagtttgtaactgtgaggaggtggactacagtaatgaataaaaacagacaacttaaagaagcaaaagttgctgaaattaaggaaaaattagaaaaatcaaaagctgttgttcttagtaagtatcaaggtctaaatgttgaagaagatacagctcttagaaaaagtttaagagaagctggagttgaatacaaagtatataaaaatactttagtagctttagcagctaaagaattaggcttagatggtatagcagaatatttagaagggccagtatctgttgcatttagttatgaagatgtaacattagctgcaaggcttttaaatgactttgctaaagatcacaagaagttggaattaaaagctggtatcatagaaggagaaatctatgatgaagctaaaattaaacaacttgcaacaataccatcaaaagaagttcttattgcaaaacttcttggaagtatcaagtctccaatatcaagctttgcacgtgtattaagtgctattgctgatagcaagggaactgaatctgcagaataatttaaagattaattaaaattttaagaaaaaaattcggaggtgctattaaaaatgacaagagaagaaataattcaagcaataaaagaaatgagcgttttagatttaaatgaattagtaaaggcttgtgaagaagaatttggagtaagtgctgctgctgctgttgtagctggtggagctgtagctggtggagctgctgctgaagaaaaaactgaattcgacgtagtattagcaagcgcaggagataacaaaattaaagttatcaaagtagttagagaaataacaggattaggattaaaagaagctaaagaaatagttgatggagctcctaagacattaaaagaaggcgtttctaaagacgaagctgaagatatgaaagctaaattagctgaagtaggagctactgcagaagttaagtagtttgttttaaagaaaaaggtgctttatagcaccttttttaaaccaaatttataaagctatataaaatgcttgttgagtaaataggtattttatatagctttataactgaaaaggattctttaataatatttattgacaagaaaaatatcctatgatattataatataatgtattattctctatggaatactatatatttatagtggaaataaggagtataatctggtgaataatggttatactatagaaagacgctgtccgaaagcaaagtccttagggaaagtatgcttttggctattttagtttattttatacaaggggtgaaaattcatggtacatcctgtccaagttggaaaaagaacaagaatgagtttcggtaaggttaatgatgttactgaaatgccgaatttaattgaagttcaattagattcatatgaatggtttttaagagaagggctgcatgaagtttttgatgatattaatcctatcacaaacttcacggggaatttagtacttgagttcgtagactataaacttgatatggaaaatatcaagtattctgtcgaagaatgtaaggaaagagacgcgacttatgctgcaccattaaaagtttcaatcagattgcaaaataatgaaactggtgaaattaaagaacaagaagtatttatgggtgacttcccattaatgacagagcaaggtacctttgtaattaatggtgctgaaagagttatagttagtcaattagtaagatcaccgggtgtatattataactactctatagataagagtggtaaaaagttatattcatcaactgttatccctaatagaggagcatggttggaatacgaaacagattctaatgatgtaatttatgtaagaattgataaaactagaaaattatcaattagtatattagcaagagctatgggattaggcagtgatcaggagttattagatttcttcggcgaagaagaaagatttagagcttcaatagaaaaagacaatactaaaactaaagaggaagcactacttgaaatatataaaagattgagacctggtgaaccaccaacagtagatagtgctatatctttaatagatacattattctttgacgcaaagagatatgatttatctagagtaggaagatacaaatttaataaaaaacttgcattaaatctaagaatagctaaccaagtagcagccgctgatattgttaatccacaaactggagaaataatggttgagaagggtcagaaaataagtagattagtagctgaagaaattcagaatgcaggtgttaaatctgttgatgtattaatagaagataaagttattagagtaattagcaataactttgtagatttgaagaaacaagtttcttttgatatttcagacctaggcataaaagaattagttcattatcctactttgaaagaaatattagataatttttctgatgaagcaagtattaaagaggaaatcaagaagaatattagtaaacttattcctaaacatattataagagatgatatatttgcaactataagctatgagctaggattaacttatggaataggttatgttgatgatatagatcatttaggtaatagaagattgagatctgtaggggaattattgcagaaccaatttagaattggtctatctagaatggaaagagtagtaaaggaaagaatgactattcaagatcaagaagctataactcctcaaatgttaattaatataagaccagtagcagcagctattaaagaattctttggtagttcgcaattatcgcaattcatggatcaaacaaatccattatcagaacttacacataaaagaagattgtcagcattgggaccaggaggtctttcgagagaaagagccggtttcgaagtaagagatgttcaccattcacattatggtaggatgtgtcctattgaaacaccagaaggtccaaatatagggcttataaattctttggcaactttcgcaaaagttaatgagtatggctttattgaaactccgtatagaattgtagacaaagagaatgcaagagctacagatgaaataagatactttacggctgatgaagaagaccaatgtttaattgcggaagcaaaagagcctatggatgaagatggaaactttacaaataaaaaagttagagtaaggcatttagaagatatattagttgttccagcaactgaagttgatttgatagatgtatctgcaagacaaattgtttctgtagctacagcaatgataccgttccttgaaaatgatgatgcttcgagagcacttatgggatctaacatgcaacgtcaagcagttccgttattaagtccacaagcaccaatagttggaacaggaatagaatataaagctgctgttgattcgggagtattgcctaaagccaaaaatgctggagtagtttcatatgtatcaggtagtgaaattagaattaagagagattcagatggcggtacagatatatataaattattgaagtttaagagaagtaactctggaacttgtataaatcaaaggcctatagtagatacaggagaaatagtatacaagaatcaagttattgcagatggtccatctacagatttaggagaaatagcgttaggtaagaacatcagaatgggattcataacttgggaaggttataattacgaagatgcgatgttaatttcagaagaactagttagagaagatatatttacatctatgcatatagaagaatatgaatgcgaagctagggacactaagttagggccagaagaaattacaagagacataccaaatgtaagtgatgatgcacttaaagatgtagatgatagaggaattataagaattggtgcagaagtaagatcaggagacatattggttggaaaagtaactccgaaaggtgaaactgagcttacagcagaagaaagattgctaagagcaatatttggtgaaaaggcaagagaagtaagagatacttcattaagagtgcctcacggagaagctggaataatagttgatataaaagtatttacaagagaaaatggagatgaattgaatccaggagtaaatgaacttgtaagatgctatattgcacaaaaaagaaaaatttcagttggagataagatggcaggacgtcatggtaataagggggttatctctagaatattaccagaagaagatatgccgttcttgccagacggtagacctcttcaaatatgcttaaacccattaggagtaccttctcgtatgaatatagggcaagtacttgaagttcacttgggatgggctgctagtcatttaggatggcatatagctacaccagtatttgatggagcaactcaacctgaaatcacagagtgcatggtaaaggcaggatttagagaagatgccaagaccatattatatgatggtagaactggagagccatttgacaatccagtaactgttggaataatgtatattttgaaacttcaccatttggtagatgataagattcacgctagatctacaggaccatattcattggttactcaacaaccattgggaggtaaagctcaatttggtggtcaaagatttggtgaaatggaagtttgggcattagaagcatatggagcagcacatacacttcaggaaatactaactgttaagtcagatgatgttgtaggtagagtaaaaacatatgaagctatagtaaaaggtgaaaatatacctgaaccaggcgtgccagaatcattcaaagttcttattaaggaactacaagcattatgtctaaatattaaagtgttaaatgatgcacatgaagaagtgactttaaaggaatttgtggatgaagatatggcaaacctagaagttaatatagagggcactgaagagattatggtgccagaaccagatgtattagatgatgatagttatgatcaaaacaatgatgaagacatggatgaaattgattatgatgaaagtgtcgatatagctgatcttgaaactgaattagaactagatgattttaatgatgaacactaattttgaagggaggatttacccttgtttgaattaaataatttcgatgcaatacaaattggtttagcatctccagaacaaataagacagtggtcaagaggagaagttaaaaaaccagaaactattaactatagaactttaaaaccagagagagatggtttattctgtgaaagaatttttggaccaatgaaagattgggaatgtcactgtggaaagtataagagagtaagatataaagggatagtttgtgatagatgtggagttgaagtcacaaaagctaaagtaagaagagaaagaatggggcatatagaattagctgccccagtatctcatatttggtattttaaaggaattccatcaagaatgggattaattttagatatgtcaccaagagctttggaaaaggttctgtattttgcatcttatatagtaatagatcctaaggaaacaccattattgaagaagcaacttcttaatgaaaaggaatatagagaggctgtagataaatacggtgatgaaagctttgtagcaggtatgggagcagaagcaattcaagatttgttaaatgaaattgatttagaaacttcttcaaaggaacttaaagaagaattaaagcaaagttcaggacaaaagaaagttagaataattagaagattagaggttgtggaatcatttagaaaatcaggaaatgatccgcaatggatggttataaatgtaataccagtaattccaccagatttaagacctatggttcaattagacggaggaaggtttgcaacatcagatttaaatgatttatatagaagagtaataaatagaaataacagattaaagaagttattagatttaggtgctccagatataattgtaagaaatgaaaaaagaatgcttcaagaagcagtagatgctcttattgacaatggtagaagaggaagaccagtaactggaccgggaaatagacctttaaaatctctttcggatatgttaaaaggtaaacaaggtagatttagacaaaacttacttggtaagagagttgactactcaggtagatcagttattgttgttggtccagaacttaaaatgtatcaatgcggacttcctaaggaaatggcaatagaattatttaaaccatttgttatgaaaaagcttgtacaagatggtatagctcataatattaagagtgccaagagaatggttgaaagagtattgccacaggtatgggatgtattagaagaagtaattgcagatcatccagtattacttaaccgtgcgcctactctacacagacttggtattcaagcgttccaacctgtattagtagaaggtagagcaataaaacttcatccattagcatgtacagcttataatgctgacttcgatggagaccaaatggctgtccatcttccattatcagtagaggctcaagctgaagctagatttttaatgttagctgcaacaaatattttaaaaccatcagatggtaagccggtttgtgtacctacacaagatatgattcttggatcatattatttaacaatggataaaaatggagctaaaggcgatggaatgacattctcaagcaaagatgaagctataatggcatatgaagttaaagaaattgacatacatgctcaaataaatgttagaatgtttagagaagtcgatggggaaataaaatctaggattattaaaactactgttggaaagattatatttaatgaatcaattccacaaaatcttggattagtaaatagagaaaatgaagaagaatcatttaatcttgaagttgatttcttaattactaagaaatcgctaggaaagattatcgatcaatgttatatgaaacatggtccagtaaagacatcaataatgcttgataatattaaggcgttaggataccattattcatcaattggagctgtaacagttgcttcttcagatataatagttcctaaagtaaaatatgatttacttaaggaagcagatgaaacagtagaaaaaattgaaaagatgtataagagaggcttcatatccgatgaggaaagatatgaaagagttatagaaaaatggactcagacgactgaagatgtagctaatgcattaatggatagtcttgataaatttaatccgatatacatgatggctgattcaggagccagaggatcaaaatctcagatcaagcagttagctggtatgagaggtcttatggctagtccatcaggtaagattatagagttacctataagggcatcatttaaagagggattagatgtaatagaatatttcttgtcaacacatggagctagaaagggtaatgcagatacagccttaaagactgcggattctggatatttaactagaagacttgttgatgtttcacaagatgttatcgtaagagaagaagattgtggtacagatgaaggaatatttgtaagtgaaattaaagaaggtaacgaagttatcgaggaattaagagaaagattaattggtagatatacagcagaagatattgttgatccagaaactggggatgtgttacatccaaagaatgaatatatggatccatatgccgctgacaagatagtttctgcaggaattaagaaagtaaagattagatctgtattcacttgtaagtgtaaagttggtgtatgtgctagatgttatggtatgaatatggcgacagctaaaaagattgatattggagaagctgttggaataatagcggctcagtcaattggagaaccaggaacacagcttacaatgagaacattccatactggtggagttgcaggagcagatattactcaaggtttacctagagttgaggagctatttgaggctagaaaaccgaaggggcttgcaatagtaagtgaaattgctggtactgcgagaatagaagaaactaaaaagaaaagaacagtaatagttatgggtgccgatggagaagaacgtagctacgatataccttttggatcaagattgagagttaatgaaagtgattatgttgaagctggagatgaaatcacagaaggttcagtaaatcctcatgatataatgagcataaaaggaatagatggagcgagaagatacttactttcagaggttcaaaaagtttatagactacaaggtgttgatattaatgataaacacttagaagttgttgttagacaaatgactagaaagataaaaattgttgattcaggtgatacagacttattaccaggaactatgattgatatgtttgatttctatgaagaaaatgctagagtaagagaatttggtggagaagaagcaaaaggagaacaaactctactaggtataactaaagcagcattagcaactgatagtttcctatcagcagcttcgttccaagaaacgacaagagttctaacagaagcagcaattaaaggaaaagttgatcctttagttggattaaaagaaaatgtaataattggtaagcttattccggctggtactggaatgatgagatatagatctttaaaggtggaaacagatagtgaattagttgaagaaactattggagaaactgttgaagaataagcatgtattatattgacatgtgcaaaattaaatgataaaatacaatttgtgtgattttaaatgtgaaatcacacaaattaatgtgaatatatcattttataaaagtaaatttatagcttaatacataggatattgatttattgtgtaaaatttaggtatatttgataagttgtatgatatactaactcatataacttgataaattagtgtttatcttaattttaaaatagataaataaatttcaggaggtgaaaaaatgccaactattagccaattagtaagaaaaggcagaaaaacagcagtagttaaatcaactgcaccagcacttaaagagtgtcctcaaaaaagaggtgtatgtacagtagttaaaacaacaactcctaaaaaacctaactcagcgttaagaaaaattgccagagttagattaacaaatggatttgaagtaactgcatatattggtggagtaggtcacaacttacaagaacatagtgttgttcttataagaggtggaagagttaaagaccttcctggtgttagataccatatcgtaagaggtgcgctagactgcgctggagtagctaacagattacaaggaagatcaaagtacggtgctaagagacctaagaagaaataggaattttaacaaagaatagtgcttatcttcaacagaaattatagattttattttgagtttatatagatgtaaaagatgtagcactttacggtatgaaaaataccgagtaccgatgaacttaaatttaaaatgttaaggagggaagaaaagtgccaagaaaaggacatatcgcaaaaagagacgtattaccagatccagtatacaattcaaaggttgttactaaatttataaatagtataatggaagatggtaagaagggtgtagcccaaaagatatgctatgaagcatttgaattaatagcaaaaagaagtggaaaagaagctttagaagtatttgaagaagctatgaacaatgtaatgccattactagaagttaaagctagaagaataggtggtgctacttatcaagttccaatcgaagttagaccagaaagaagacagacattaggaataagatggatgttaatagcagctagaaaaagaggcgaaaagctaatgagtgaaagagttgctggcgaattattagatgcatctaataatacaggagcagctgttaagaagagagaagatactcataaaatggcagaagctaataaggcatttgctcattacagatactaatatctataaaactgttttggcttatgctaaggcagttttgtcaaattaaattatattttactcattgagaggaggacaaataaatggctagaaaatatcctttagataaattccgtaacttcggtataatggctcatatagatgctggtaagacaacaactactgaacgtatattgttctatacaggagtgagtcacaaaataggggaagttcatgatggtgaagctacaatggactggatggttcaagaacaagaaagaggtataacaattacttctgcagcaacttcatgtttctggaaagaacatgaacttaatattatagatactcctggtcacgtagacttcacagttgaagttgaaagatcattaagagtacttgatggagctgttacagttcttgatgcaaagagcggtgttgaaccacaaactgaaactgtttggagacaggcagataagtatggcgtgccaagaatgatttatgtaaataaaatggatgcaacaggtgctgatttctttagatgtattcaaacagttaaagatagattaaaagcaaatgcagttccgattcaaattccaataggtagcgaacaagactttaaaggaatggttgatcttataaagaatgttgcttttatattctatgatgatcttggaaaagatatgagagaagaagctataccagctgaatatgctgatcaagctgaagaatacagagcagcaatgatagaagctattgctgaaacagatgaagaattaatggaaaaatatttagaaggcgaagagcttacagttgaagaattaaagactgccttaagaaaagctacaattgctaatgaaatatatccttgtatttgtggttcttcatacaaaaacaaaggtgttcaagaaatgattgatggagttgtagattatttaccatcaccattagatgttccagcaataaaaggaacaacattagatggagaagatgatcatagaaattcttcagactctgaaccattatcagctttagcatttaaaatagcaactgatccatttgttggtaagttagcatttacaagaatatattctggtgtaatgcaaagtggttcttatgttcttaactcaacaaaaggtaagaaggaaagaattggtagacttgttaagatgcattcaaattcaagatcagaagttgaatcgttagaagcaggagaaattggtgctgtaattggtttaaagaacactacaacaggtgatactttatgtgcagaaaatagtccaataattcttgaagcaatggaattcccagaaccagttataagagtagctattgagccaaagacaaaagatgctcaagaaaagatgggattggcattggctaaattagcagaagaagatcctactttcaagacttggactgatacagaaacaggtcaaacaattattgcaggtatgggagaacttcacttagaaataattgttgatagacttcaaagagaatttaaagttgaatgtaatgttggagcacctcaggttgcttataaggaaacaattagatcagctgttaaagcagaagctaaatatgctaaacaatcaggtggtaaaggacaatacggtcatgctgtaattgaaatggaaccaactgaaggtgaatatgtatttgaaaatgctatcgtgggaggagctattcctaaggaatatattccagcaatcgatgcaggtattcaagaggcatctaaaaatggtataattgcaggttataatgttattaactttaaagttaagttagtacacggttcataccatgaagttgactcatctgaaatggcatttaaaatagcaggttctatggcattcaagaatgcaatgtctaaagcaagccctgtacttcttgaaccaatgatgaaagttgaagtaacagttccagaagaatacatgggagatgttatcggagatatcaattcaagaagaggtataatggaaggtatggaagctcttaatggagcgcaagttatcagagcgtttgttccattatcagaaatgtttggatatgctactactttaagatctagaactcaaggtagaggagtttactcaatggtatttgatcactatgatgaagttccaaagaatattcaagaacaaattgcaggtagcagagctaaataaagagtaatataaagtttttatcatattgtatattaaattattttacggaacatataatgtgttttaataatttttatataatatggtaaaaaacttgaataataaatatagatattaaaatatctataagttataatatttacgaaaagattctttaaattatgtctatcaagggaggaaaattataatggcaaaagcaaagtatgaaagaagtaagccacacgttaatattggaacaataggtcacgtagaccatggtaagacaacattaacagcagcaatcacaacagtattagcaaataaaggatatgcagaagcgtttaactatgcagatattgataaggctccagaagaaaaagaaagaggaatcacaatcaatacagcacacgttgagtatcaaacagaaagcagacactatgctcacgttgactgtccagggcatgctgactatgttaagaacatgattacaggagcagcacaaatggatggagctatcttagttgtatcagcagcagatggtccaatgccacaaacaagagaacatatactactaggatcaagagttggtatccaatatatcgtagtattcttaaataaagcagatatggtagatgatccagaattattagaattagtagaaatggaagttagagaattattaagcgaatatgacttcccaggagatgatattccagtaataacaggatcagcattaaaagcattagaaaacccaacagatgaagaagcaattaagccaataatggacttaatggaagcagtagatagctatatcccaactccagaaagagcaacagataagccattcttaatgccaatcgaagatgtattcacaattacaggaagaggaacagttgcaacaggaagagttgaagctggagtacttcatgtaggagatgaagtagaaatcgttggattaacagaagaaaagaagaaagttgtagtaactggaatcgaaatgttcagaaagttattggatgaagcacaagcaggagataacatcggagcattattaagaggagttcaaagaactgatattgaaagaggtcaagttttatcaaaaccaaattcagtacaccctcacacaaaatttgtaggtcaagtatacgtacttaaaaaagaagaaggtggaagacatactccattcttcgatggatacagaccacaattctatttcagaacaacagatgttacaggatcaatcaaattaccagaaggaatggaaatggtaatgcctggagatcacattgatatgaacgttgaattaatcactccaatcgcaatggatgaaggattaagattcgctatcagagaaggtggaagaactgtaggttctggagttgttactaaaatagtagaataagatacatttatattttatagtaaaagcaaggtataatttccttgcttttattttatgaagtatataatttagttagtattatataatgaaattagattgttctcaccataatttatttattatcaaaaaaataaattatggcaaactgaaataaaatttttagtaaagataaccaaaaaatcgccaaatatcaagaatgaaaaaaaattaagaaaatgtaaaaaaaagcttgaaaagacaatataacaatagtataattaagaagttgcatagcatacagcgaggattcaagaggttgccggacttccgggtaattcttgatgagtaagtttggatctagaatccgacgacagggattctgtattaagtctggatatcacgaaacacctggaacagtttacagaatagccgctgttgtgcgttagaagtaaaacgtacataaaaggagggaaatgaaatgtcaaagcaaaaaataagaattagattaaaggcttttgatcatacaattttagatcaatcagctgaaaaaattgttgaaactgcaaaaacatcaggagctaaggttgtaggaccagtgccactaccaactgaaaaagatgttgttacaatactaagagcggttcacaagtacaaagattcaagagaacaatttgagataagaactcataagagattaatcgatattgttaatccatcacctaaaactgttgatgcattaatgagattaaatcttccagcgggtgttgatatagaaatcaagctttagtactgggaataatataaaacggctagttatgattgttaacagtccgctaattagtttgggaggtgtaaatacatgaaaaaagctataattggaagaaaagtaggaatgacacaaatttttgatgaaaaaggaaaagtgattcctgtaactgtagtagaagctggcccatgtgttgttgttcagaagaaaacattagaaaatgatggttatgaagcaatacaagttggtttcgatgaaataagagaaaaattagctaacaagccaagaaaaggtcactttgctaaggcgggagctactttaagaagaactcttaaagaatttagacttgaggatataagtcaatacgaagttggaaatgaaataaaagctgatgtatttggagcaggagataaagttgatgtatctgcagtatctaagggaaagggtttccaaggatcaattaaaagatggaatcaacaaagagggcctatgactcatggttctaagttccatagagcaccaggttcaatgggagcttcatcagatccatctagaacattcaaaaacaagagaatgccaggacatatgggatctgtaaatacaacagtacttaatttagaagttgttaaagtaatagctgaaaagaatttaatactaattaagggtggaatcccaggacctaataaaggtacagtagtaattaaagatacagttagagcttaatttctttgaagaaaggaggaaataaaatgcctacagtaggagtatttaataaagaaggaaataaagttgcagatatggaattaaatgaaaatgtatttgcagcagaaattaatgaatatgcattacaccaagtagtagttgcattattagctaacaaaagacaaggaactcaatcaactaaaactagatctgaagttagaggaggcggaattaagccttggagacaaaagggtactggaagagcaagacaaggttctatcagatcaccacaatggatcaaaggtggaattgtattcgcaccaaagccaagagattatagagtttcagttccaaaaagtatgagaaaggttgctatgaaatctgctttaactagcaaggttcaagataatcaaatgatagttcttgattcattaaattttgaagcaccaaaaactaagagcatgatagaaatgctaaaggctttagaagctaataaagcattaattataacagctgaatcaaatgaagttgtttataagtcagcaagaaacattcaaggaataagtgttattcctgcaaacaacatcaatgtatatgatttattaaaatatgaaaaattaatcataactaaagatgctgtatcaaaaattgaggaggtgtacgcataatgaaattaacaagccatgatataataagaaagccaatcataactgaaaaaagtatggcgtctatggccgaaaaaaggtacactttcatagttcatgttgatgctaataaatctcaaataaagagagctgtggaagaagttttcaatgttaaagttgaatctgttaacactataaacggcttaggtaaaactaagagaatgggcgtacatgtaggtaagagatcagattacaagaaagctatagttacattaactgaagaaagtaatggaattgaattcttcgagggaatgcaataatagtagaataaagccattattggtgatcaacaccagagaagcttgaagaaggagggaattttaaatggcagttaaaaagtttaaccctattacaccagcgagaagacaaatgactatgccaacttttgaagaaataacttcacaagaaccagaaaagtcacttcttgttgcattaaagagtaaagcgggtagaaatgctcaaggtaaaattactgttagacatcgtggtggcggtgttaagagaaaatatagaataatagactttaaaagaaataaagatgaaatcccagcaaaggttgcaactatagaatatgatccaaacagatcagcatatattgctcttgttatatatagcgatggggaaaagagatatattcttgcacctgcaggattaaaagttggagatgtaatagagtctggagttaatgctgatatcaaacctggtaatgcacttccattaaagaatataccagtaggtacagttattcacaacatagaattacaaagaggtaaaggtggtcaattagttagagcagcaggtggatcagctcaattaatggctaaagaaggagattatgcaactcttagattaccatcaggtgaaatgagatatgtaagaatcgaatgtagagctacaataggaacactttctaatgcaacaaacgatatcgttaatatcggtaaagctggtagaaagagacatatgggatggagaccaacagttagaggatctgtaatgaaccctaatgatcaccctcatggtggtggtgaaggtaaatctccagttggtagaccaagtccagttactccatggggtaaaccagcacttggatacaaaactagaaagactaagaaatattcagataaatttattatcaaagatagaagagctaagtagtttgaggagaatagtaagttctcttcacaacttagaccttagtgtttatgaagggaggcatattagtgagtagatcaacaaagaaagcaccttttgttcatgagggactttttaagaaaatagaagaaatgaatggtaatggagaaaaaaaggttgttaagacttggtcaagaagttcaacaatttttccacaattcataggtcatacaattgctgttcatgatggaagaaagcatgtaccagtatatatatcagaagatatggttggccataaattaggtgagtttgtattaactagaacttataaaggtcatgacgataaaacatcaaaaagatagcctggaaaggaggatcataaatggaagctagagctatagcaaaatatattagaatgtctccaacaaaggtaggagtaattcttgatttaataagaggaaaacaagttaacgaagcttttgctattttacaatatactccaagagaagcagcggtagttataaataaagttttaaaatcagctgttgctaatgcagaaaacaatttggaattgaatgctgataatttatatgtttcagagtgtttcgttggtcaaggatcaacattaaagagattccaacctcatgctcaaggtagagcatttaaaatattaaagaaaacaagcaatataacagtagttgttaaagaaagagcttaataagataaaaggagggaaaagcaagtgggtcaaaaagtaaatcctcatggccttagagtaggtgttatcaagggatgggacgcaaaatggtatgctaacaagaaaaactttgctgataatcttatagaagataacaagatcagaaaatttgtgaaaaaggaacttttttctgcaggtatttctaaaattgaaattgaaagagctgctaaaagagtaaaattaaacatatatacagcaaagcctggtgttataataggtaaaggtggatctggaattgaggctttaaaaaataaattaactcaattcgttgaaaataagaatgttttaataaacatagttgaagttaaaagtgcagaagctgatgcacaattaatggctgaaaatattgctgcacaattagaaaaaagaatttcattcagaagagctatgaagcaaacaatgcaaagagctatgaaacatggaataaagggtgttaaaactgcttgttctggtagattaggtggagcagaaatagcaagaactgaacattatcatgaaggaacaattccactacaaacattaagagctgatatcgattatggatttgctgaagcagatacaacatatggaaaaatcggagttaaggtttgggtttataatggagaagttcttccaactaagaaagtagaaaaggaagaggctaacgcataggaaaggaggaatagatcatgttaatgcctaaaagggtaaaacatcgtaaggtgcaacgtggtagaatgaaaggtaaagctacaagaggtaatttcttagcttatggtgattacggaatccaagcgctaacttgtggatggataacaagtaaccaaattgaatctgccagaattgctatcaatagatacattaaaagaggtggaaaactttggataaagattttcccagataaaccagttacagaaaagccagctgaaacaagaatgggttcaggtaaaggatcaccagaatactgggttgcagtagttaaaccaggtagagtactatttgaattatcaggagtaccagaagaaactgcaagagaggcaatgagacttgcttcacataaacttcctgtaaaaacaaaatttgtttcaaaaagagattttgaggaaatgggtggtgaagaataatgaaggctagagaattaaaagaattgaaatcaagcaatcctcaagatttaacagttaaattgggcgatcttaaagcggagttatttaatttaagatttcaattagctacaggacaattagaaaatccaatgagaataagagaagttaagaaatctatagcccaaataaaaaccatcttaagagaagaagaattaaaagcattggaacaataaaagttggaaggaggtaagccctaatggaaagatcattaagaaagaaaagaattggtagggttgtttctgataaaatggaaaaaactattgtagttgcagttgaaactaaggttagacacccattatacggtaagacagttaatagaactacaaagtttaaagtacatgatgagaataatgaagctaaaattaatgatagagtatcaataatggaaactagacctttatctaaagataagagatggagacttgttgaaatagttgaaaaggctaaataagctttaaaactgaaaggagggtaatttaatgatacaacaacaaaccttattaaaggttgcagataattcaggtgcaaaagaaattatgtgtatcagagtattaggtggatctaaaagaaagtttggtaatatcggcgatgttatagttgctagcgttaaaagtgcaacaccaggtggagttgttaaaaaaggtgatgttgtaaaggcagttgtagttagatcagtaaaaggtgtaagaagagctgatggttcatatattaaatttgacgaaaacgcagcagttataatcaaagatgataagcaaccaagaggaactcgtatctttggacctgttgctagggagctaagagataaagaattcactaaaattttatcattagcaccagaagttctataagaggaggtggccaacttgaagatacatgtaagaaagaatgatacagttattgttatatctggaaaagataaaggcaaaactggtgaagtgttaaaagcgtatccaaagacaggaaaagttcttgttcaaggagttaatatagttaaaaaacatcaaaaagctaataagggtcaagttgaaagcgctataattgaaaaagaagcagcaatcaacagctcaaaagttatgttatattgtaacaaatgtaagaatgcgactagaattagtaacaaagttttagatgatggtactaaggttagagtatgtaaaaaatgcggagaaacattctagattttgaaaggaggtaactaatatgacaagacttcaagaaaaatatcaaaaagaagtagttccagctatgattgaaaagttcggatataaaaacataatggaagtaccaaagctagaaaagatagtaatcaacatgggagttggagaagctaaggaaaatcaaaaagtgctagaatcagcagttaatgatttgactttaatagcaggtcaaaagcctgtattaacaagagctaaaaagtctgtagctaactttaaaattagagaaaatatgccattaggatgtaaagttactctaagaaaagctaacatgtttgaatttgctgataagctaatgagcatagcactaccaagagtaagagatttcagaggagtttctagcaaagctttcgatggtagaggaaattattcattaggaattaaagaacaattaatattcccagaaatagaatatgataagatagataaagttagaggaatggatataatcttcgttactacagctaacactgacgaagaagctagggaattattaagattccttggaatgccattcgctcaataataaggagggaaacacattggcacgtaaggctattattgaaaagtggagcaaaactcctaaatacaagacaagagcttatacaagatgtagaatatgtggaagaccacatgctgtattaaaaaaatatggagtatgccgtatttgttttagagaacttgcttataagggcgaaattccaggttgtagaaaagcaagttggtaagatatacgatgtaacgaaaggaggcacattaaatggttatgacagatcctatagcagatttattaactcgtgtaagaaatgctaatgctgtaagacatgaagtggtagaagtaccttcttcaaacgtaaagaaggaaattgcaaatatattattacaagagggttatataaaagaaataaatgaatataacgatggagttgttccaatgttaagattatctcttaagtatggagctaacaaagaaagagttataactggtattaagagaatttctaaaccaggattaagagtttattgtaagaaagatgaggtaccaaaggttcttaatggattaggtattgctgttgtttcaacttcaaatggaataatggtagatagagaagctagaaagaacggattaggtggagaagtaatctgctacgtttggtaatatttcagataaattaaactagataaaattgtaaagtgcaattttaaaataatacaggaggtgcaattatgtcaagagtaggtagattaccaatagctattcctgctgatgtaactgttactgtaacaccagacaatttagttacagttaagggaccaaaaggtgaattagttaaaactatgcataaagatattagcatagctgttgaaaacaatgaagtaattgttactagacatagtgaacaaaaagatcacagagctcttcacggtttaacaagagcattaattaataatatggtaattggagtaaaacaaggataccaaaaaactttagatttagttggtgttggttatagagctcaattacaaggcaaaaagcttgtaatgaaccttggatattcacatccagttgaaattgaacctattgacggaatcacatttgaaactccagctgcaactagagtaatagttagtggaatcgacaaagaaaaagttggatttgctgcagcggatataagaaaatggagagtaccagaaccatataagggtaaaggtatcaagtatgaaaatgaagtgatcagacgtaaagaaggtaagactggtaagaaataatagaaaggagtgagttttatgttcaaaaaggtagacaaaaaggcgagcagagaaaaacgtcaccttagagttcgtaaaaaagtttttggaactgcggaaagaccaagactttcagtatttaagagtgaaaagaatatatatgcacaagttattgatgatataaatggtgttacattagtagctgcttcaagtttagaaaaagattttgctgcaaaaggcggaaacaaagaaggtgctaaacttgtaggtgaattagtagctaaaaaagctatagaaaagggaattgacgtagtggtatttgatagaggcggatacatatatcacggaagaattcaagaattagcacaagcagctagagaagctggcttgaaattctaattaaacaaggagggaaataaatgagaatcgatcctagtacactagaccttaaagaaaaggttgttttcataaacagagttactaaggttgttaagggtggtagaaacttcagattcagcgctctagttgttgtcggagacgagaacggacacgttggcgttggaatgggtaagtcaatcgaaatcccagaagcaataaaaaaaggaatagaagatgctaagaagaacttagtaagcgttgcaatggtaggaacaacaattcctcaccaagttaatggtaagttcggaactgcaaatgttctaattatgccagctaaagaaggtacaggagttattgctggaggtccagcaagagcagtacttgaattagcaggattaaaggatgttagagctaaatcattaggttcaaataatcctaataacatggtaaatgcaacaataaacggattagctagcttaagaacagtagaagatatagctaaattaagaggcaaatctgttgaagaaatattaggttaaggagatattgcaatggctaaattaagaattacattagttaagagcttaataggtagaaaaaaagaccatatcgctactgcaaatgctcttggactaacaaagataagaaaaacagtagaacctgaggcaacacctcaagttcaaggtatgataaaaaagattgaatatctattaaaagtagaagaagtataaaaacaaggaggtgcactgaatatgaaacttcacgaattaaaaccagcagcaggtagcaagaaagcacctaaaagaattggtagaggtactggttctggattaggaagaaatgctggtaaaggtgaaaagggtcaaaatgcaagatcaggtggtggcgtaagacctggttttgaaggcggtcaaatgcctttatatagaagacttcctaagagaggttttacaaacatttttgcaaagaagattgttagcataaatcttgacagattaaatatctttgaaaatggtactgaagttactccagaattattacttgaaagaagagttgtaagtaaagttttggatggagtaaagattcttggaaacggaacattagaaaaaagcttaacggttaaaggatgtaagttctctaagtctgctatagaaaagattgaagcagctgggggaaaagttgaggtgatgtaaagtgcttcaaactttaagcaatgcattcaaagttcctgaacttagaaaaaagattttatggacagtattattagttgcagttttcaggatgggaagtcatattcctcttcctggaattaactctgattttttaaaaaatctatctcagtctggtggactattaggattttatgatatgctttctggaggagcttttagcagatccagtatattagcattaggagttatgccatacattaatgcatcaataataattcaattattaactgttgctatcccacaattggaacaactatcaaaagaaggagatacaggcagaaaaaagatacaaaatgcaacacgttatgtatctcttggaatagcttttatcttagcttatggaatttttgcaacaatttcaagcagtggagctacagttggattaactgcaatccaaaaaactattgttgtttttgcgctagtggttggaacaacattttgtatgtggctgggtgatcaacttacagttaagggcattggaaatggtacttcaatactaatattcgttaatataatttcgagagttccagcaacaattgcttcaatgatgacacttcagcaagcaggaagtgcaagtattgtggaaattgtactatttggagtatttactgtatttctacttgctactatactatatttttctttatcagaaagaaggatacctgtgcagtatgctggtaaatttgcatcaggcaatagtaatatagttaaatcacaatcaacacatataccattaagtataattggatcagcagttcttgctattatattttctatgtccgtaatggattttccaaaaactattgccacattatttggtggagtaggtgaaagtcaaaaagagtgggcaaaatggatattaaataatcctacatctatctttaataacaagagttggatgtatctagtactatatgcagtactgacaatattctttaattggttttatactcagattacatttaaaccagatgaaatgtctgagaatttgcataaatcagcaggatttgtgcctggagtaagaccaggtgaagaaaccacaacatattttgaaagagttttaaatagattatcttttattggaggcatattagcagcagtattggctgtaactccagttatgatacaaaattatacacaatttcaaaatatagctttttcaggaactggattattaattgttataaatgttgcgttagattttactagaaaagtagaatcacaaatggtagttaggcactataaaggatttcttaaatagattagaataaatggagatgaagccagtgaagatagtattactaggtcctcctggagctggaaagggaacacaggctaaatcaattagcaataaatattcaataccacatatttctacaggtgatattttcagaaagaatatttctgaaaacactcccttaggaatagaagcaaagggttatattgataacggacaattagttcctgatgaagtaacaattaatatggttaaggatagactgcaacaggacgattgtaaggtcggatatttattagatggttttcctagaactgtggctcaagctgatgctcttaacaactttcttgtagataagaatgaacaattagataccgcattgcttataaaggtacctaatgaatttattctagaaagaatgactggtagaagagtatgtccatcatgcggagcaagttatcatgttaaatttaatcctccaacaaatgaaggaaaatgtgatttgtgtggaagtgaagttatacagagaaaagatgatacagttgagactgtaaaggaaagacttgatgtatatcaaaaggaaacacaaccgctaattgaattttacggtgaaaaaggcttgctttcagaagtagatggcacaaaagctattaatgaagttttcagaggaatatgtgaattgttggggaacaacaaataatgattactgtaaagaatcatgatgaaatagccataatgagaaaagcaggtagaatagtaggagaaacattgctattgcttgaaaaagaggtaaaacccggagtaacaactgcaaatttggatagaatagcagaagaatttataactaagcatggagcaaaaccttcatttaaaggcttatatggttttccttcgtcactatgtatttcagtaaatgagcaagtaatacatggattcccaggagaatatgttcttaaagaaggcgatatagttagtattgactgtggggcgttttttgatggattccatggagatgctgcaagaactttctctgtaggggaagtttcagtagaagctcaaagattaattgatataacaagagaaagttttttccaaggtataaagtttgcaaaacaaggaaataaattaactgatatatcacatgagatacaaagctacgtagaagcagcaggtttctcagttgtaagagattttgtaggtcatgggattgggcgaaaagttcacgaggatcctaatgtacctaatttcggaaagtctggtagaggtccgaaattactggagggtatggtgttagcaatagaacctatggttaacgttggtacttataaggttaagacattaaaagatggatggacagttgtaacagcggattcttctttatcggcacattatgaaaatacagttgcaattttatcagatggacctgaaatattaacactgattaagtagaataaagagtgttgcttagttataaatttgcataataccgttgtggtagtgttaatttatactaaggtaatcatagaggtgaaaaatttgcaaaacaatgacttgattggaaaagtagtactttcaaaagcaggaagagataaagatcacttatatgttgttgttaggcagatagatgatgattatgtattactagctaatggagatacaaaattaattgagatgcctaagaagaaaaaaattaaacacttaagtattttagaagatgtagatgatgaattattatcattaataaactcatgcgataagagtactaatttaaagattaagagattcctaaagcttagaggcattgttaaggagggttgattaccttatgtcaaaagatgatgttatagaaatgcaaggtacggtattagaatctttaccaaacgctatgtttcaagttgaacttgaaagtggccataagattctagcacacatatcaggtaaattaagaatgaacttcataagaattttgccaggagataaagttacagtagaactttctccttatgatttaaccagaggtagaattacatggagagcaaaataaagtagatataacttacattgatctactacaaaagtaatatgaggagggttagctatgaaagtaagaccatcagttaagcctatttgtgaaaagtgcaaagtaatcagaagaaaaggaaaagtaatggtaatctgtgaaaatcctaagcacaagcaaaagcaaggctaatgatcaagtttacaatattatttacattaaaataaatgtaaataatattgacatttcagcaaaagtcaaatatgattatatagtcgtttaattaatcaaaaataaattttagggcggctggcaatagaatcgtctattgacctaaaattttattataaattataaatcataaattataaaatcaacttttatacatttcaattatcaggaggtgtaaattttaatggcaagaatatcaggtattgatctaccaagagaaaaaagagttgaaataggtttaacatatatatatggaataggattatcaacttcacaaaaaatcttagctgtaacaggaattaatccagatacaagagttaaggatttatcagaagaagaagttaatgaaatcagaacttatatcaacaagaatttaatggttgaaggtgacttaagaagagatgtcgctttaaatatcaagagattagtagaaataggatcatatagaggaattagacatagaagaggtcttccagtaagaggacaaaaaactaagactaatgcaagaactagaaaaggtcctaagaagacaatagcaaataagaagaaatagtaaggagggaagataatggcagctaaaacagtaaagaaaactagaagaagaaaagaaagaaaaaatgttgagcatggtgctgcacacattaagtcaacttttaataattcaatagttactttaacagatgcagtaggaaatgctttatcatggtcaagtgcaggagcactaggtttcagaggatcaagaaagagtactccatttgcagctcaaatggcagcagaaactgcagctaaagtagcaatggaacacggcttaaaaagtatagaggtttatgttaaaggacctggttcaggaagagaagcagctataagatccttacaagcagcaggactagaagtaactttgattaaagatgttactccaataccacataatggttgtagaccaccaaagagaagaagagtctaatataaatgtagtaataggaggtgtaatttaatggcaagatatactggcgctacatgtagattatgtagaagagaaggtatgaaacttttccttaaaggtgatagatgttttacagataaatgtgctttcgttagaagaagctatgcaccaggacaacatggagctaacaaaaagaaagtatcaaactatggtgttcaattaagagaaaagcaaaaagcaagaagaatttatggcatattagaaggccaatttagaacatattatgaaaaagctgagcatattaaaggtataacaggtgaaaacttacttaaattactagaaatgagacttgataacatagtttatagattaggttatggttcatcaagaaatgaggcaagacaattagtaactcacggacatttcttagtaaatggtaaaaaggttgacatttgttcatatcatgtttcagttaatgatgtaattactgtatgcgaaaagagcagatcaagtgaaaagttcaaaacttttgttgaaaatccaaaaactttaccaaaatggttagaagctaatgttgataactatgaaggaaaagtagttgcagagccatcaagagaagatatagatgtgcctgttaacgaaacacttattgttgagttatacagtaaataatatatttatatttgttagagaaatttatcacaatatatgcaaatatagaatcagttgccctcataataaggttgccatttttaaaataaggagggtttgtcaatgttagaaatcgaaaagccaataatagaatgtatagaagctaatgaagatggtacttatggtaagtacgttgttgaaccacttgaaagaggatacggtattacattaggaaatgccctaagaagaatattattatcatctcttccaggagttgcaacaacctctgtcaaaattgatggtgtgcttcatgagttttctactgttcaaggagttaaagaagatgttactgaattaattcttaatatcaaatcattagctctaagaatgaatggtgaaggtccaaaagttatttatattgatgctaaaggaccaggagaagttactggagcagatataaagactgatggtgatgttgaagttgttaataagaatttacatattgcaactttagataacgatggaagactttatatggaattgacagttaataagggaagaggatatgttactcaaaataaaaataagagtgatgaattacctatttcagctatagcagttgattctatttatacaccagtaaaaagagttaattttactgttgataatacaagagttggtcaaattactgattatgataaattaactttagaaatttggactaatggtaccataaaaatagatgaagctattagtttatcagcaaagatacttattgaacattttaaattattcatgtcattaacagataatactaatgatgttgaaataatgatagaaaaagaagacgataagaaagaaaaagtcctagaaatgactgtagaagaacttgatttatcagttagatcatataactgtttaaagagagctggaattaatacagtacaagaacttgccacaaagtcgatggatgatatgatgaaggtaaggaatttaggaaagaaatctttagaagaagttgaaagaaagcttaaggaattaggtttagcactaaaactaagcgaggagtaaggaggtaaatccatggcaggttatcgtaaactaggtcttcctacagaccaaagaaaagctatgctaagaaatcttgttactagtctattaaaacatggtaaaatcgaaacaactgaaacaagagcaaaagaaactagatcattagcagaaaaaatgattactcttggaaaaagaggagatcttcatgctagaagacaagtattatcttatgttcaagaagaattagttgttaagaatttatttgataatgtagctccaaagtatgctgagagaaacggcggatatacaagaataattaaaaaaggtcctagaagaggggacggagctgagatagtaatacttgaattagtataatactaatgggggattaagtttaaacttaatccccattttgacatagaaaataaaatttgaacttaatttattatagagatgttttcttactcaagatatatatttttttgttgaatatgctagattttgagatataatgaaaataataatttaatatcaaagacaactatgttgttaatgaaaaacatttgtataatatattaattaaaactataaaacatcatggggaggtacactatgagtgatgcgatgataaagtgtgcaaaagtatcttttaaatatgtaaaggatacagaaggagttaagcaagaaaaatatgcaataaaagatgtagatttggaggtaaaaaagggggagtttttagtagttttagggcataatggatcaggtaaatcaacgatagctaagcatatgaatgcattggttgtaccatcagagggaacagtgatagtagatggcttggatactagtaaaatggagaatgtttgggagattagatctagagcaggaatggtgtttcaaaatcctgataaccaactagttgctaccatagtagaagaagatgtagcttttggaccagagaatttaggaatagaaccatcagagataagaaaaagagtcgatgagagtctagagaaagttggaatgagcaaatataaaaggcatgcaccacatcttttatctggtgggcaaaagcaaagaattgctatagcaggaatacttgcaatacaacctgaatgtataatttttgatgagccgacagcaatgttggatccatcaggaagaagggaagttctaaaaaccataaatgaattaaataaaattcatggtattactattgtattgataacacactacatggatgaggcagctcaagctgatagaattgtagtaatggatggtggaagtgtaaaaatggaggggactcctagagaaatttttcctcaggtagagcgaatgaaaaagataggtttagacgttccacaggttactgaattagcttatgagctaaaaaaggcaggaatagatataaacgaaaaaatattaaatgtggatgagatggtgaatgaattatgtcaattaaagtagaaaatttaacacacatatatatgcctaagagtccatttgaaaagactgcattggacaatgtgtctttagaaataaaagatggagaatttgtagcactaattgggcatactggctctggtaaatctactttaatacaacattttaatggtttactagaagcaactagtggagaaataattgttgatggaacaaatattactgataaaaaagcaaagcttacggatataagaaaaaaggttggcttggtatttcagtatccggaatatcaaatttttgaggaaactatagccaaggatattgaatttgggcctagaaatttaggactttcagatagtgaaattaatgagagagtaattagggccatggaaatggttggcctggactatgagacttataaagataggtcgccatttgacttaagtggcggtcagaagagaagagtagcaattgcaggggttatagcaatgcaacctacaacactaatattggatgagcctacggcagggttagatccaaagggtagagatgatatattagatcagataagaaagctacatgaggattataatatgactataattatagttagtcatagtatggaggatgttgcaaagattgcagaaagaattattgtgatgaatggtggaaaaatagcactacaaggaactccagcacaagtatttaaagaagttgatgtgctagagaagataggacttggcgtccctcaggtaacatatctaataagagaactaagaaaaaaaggatttgacattccagataatatatttacgatagaggaagcaaaaaagcaacttttgtctactttgaggataaataaagtgaaaggggaatagacaaaattatgttgaagaatattacaataggacaatatttacctggagagtcatttgttcataagttagatcctagaacaaagatacttatatcaatactttttattgcgtgtttatttatcataaataaatttataggttatacttttgtggttatttttttactagctataatattgatcgcaaaggtgccatttaggtttatttttaatggattgaaaccaatttttctattgatagtattaacagctgctctaaacatatttatggttaggggcgctgaagggacagaagtttttagtattggatttttaaaggcatatccagaggggttaagtattgcagcatttatggcaataagactaattctattaatagtaggaacatcactgttaacattaacaacatctccaattgagttaactgatggaatcgaaaaattattaaggccaattggaaaagaaatggctcatgaacttgctatgatgatgacaatagccttacgatttatacctactttaatagatgaaacggataaaataatgaaagctcagaaggctagaggtgctgattttgagtcaggtggaataataaaaaaggctaagagtttagtaccattattagtgcctttatttatcagttcatttagaagagcagatgaattagcaatggcaatggaagcaagaggctatagaggtggtgctgggcgaactagaatgaaaatacttgagttttcgtatagggatctggttgcctttattgtattttgtattttagttttatggtgcatagctgtaagattcattatgctataggagtaagataacttaaatgagaaatataaaattaattattgagtttgatggaagtaacttttgcggatggcaaaggcaacccaaaggcagaactgttcaaaaagtaatagagacagcaatatttaaggctactggagaggaaattatgattaatggaagttccaggactgatgcaggtgttcacgcaagggaaatggttgcaaactttctgactaattcttcaatacctggagataagtttagagaagctattaatacaagactgccagaagatgtatctataattaaatcagaagaagtaagtgaagattttcatgcaagatattcatcaaagggaaagacatactcttacacaattgtaaatagatatgaaaggttatctttaggtcatcaatatctgtatcattataagtataaattggatataaatgagatgagaagagcatgtgaatattttatagggagacatgactttagggcgtttatgtctcctggaagctcaataaaaactacaacaagaactattcaggatctctatatagagcaaaatggagatgaaataaaaatatttattacggctgatggatttttgtataatatggtgagaataatagtaggtacattaataaagattggaaatggaagactagaagcggaaaatataaaagatataatagaagaaggaaatagaaaaaaagcaggaatgtgcgtaccgccaaatggattaatattagaaaaagttttctattaaatcataaaaatgtgttgacacgcccgtgtgcgtgtattataataggtttgtttgttaaaacatttatgtatataagatccactagccccgggtcttgacataaaaaatcttacttaaaataatgagtaaagaattaatgtaagttcagggagggaaacagatgaaatcatacattgctaaagcaagtgaaattgaaagaaaatggtatgtagttgatgctgctggtaagccactaggtagagttgctagccaagttgcttcaattttaagaggtaaaaataaaccaacatttacacctaatgttgactgcggagattttgttattgtaattaatgcagaaaaggtagttttaactggtaagaaattagatcaaaaattaatgagaaagcatagtctttacccaggcggattaaaagaaactccttatagagtagtattagataaaaagcctgaatttgcttttgaagaagcagtaagaagaatgcttccaaacggtgttttaggaagacaaatgttaaagaaattaaatgtatataggggtgcagaacataatcatgcagctcaaaaaccagaagtactagaattaagatactaatacgatctcgggaggaggaaaaagaaatggcaaaagttcaatacatgggaactggaagaagaaagaaatcagttgcaagagtaagacttgtaccaggaagtggtaaggttcttgtaaataaaagagaaatagaaaacttttttggtttagaaacattaagagttatcgtaaaccaaccattagttttaactggaactaaggatagatttgacgttttagtaaatgttcacggtggtggatttacaggtcaagcaggagctatcagacatggtatagctagagcattagttaaatctgatgaagctttaaagccagaattaaagaaggctggattcttaacaagagacccaagaatgaaagaaagaaagaaatacggtcttaaagcagcaagaagagctccacaattctcaaagagataatatttggagatcaaaaatcccacaaacgcggtgtttgtgggatttttattttatatagaaatatgtaatctttaatgaacaaatacaaataatagttattacatgcctaataatgcggttctcgtactattccctaatatagttataaactcttccattatatatatgttgaaactaagtttatatattttgccttaactgaattctttagctattagaattctaaatataacttcagtattaaaatacatatatatgtattttaataagtcctaaataatataatttattctttataaaattattaacatttctatatatggtaattacagctggattccaattgattaaatatttcagatattatattaaaaaattgtagtgagatatctattgagtattccataaaatatctctaataaaaaaataaaaatttactaatataaatgaatttgaataattaagagtgtatagcaaacaatacactatgtaagtctaaatgatttggaggaataattttatgagaatgaaaaaatggatagcattgttctgcgtattttgcttaatgtctggaattccagtaagaacaaattccgaagaaaataaagataaaaggataatattaatagatcctggtcatggaggaattgatggtggggcaaaatcaaagagtggaactatagagaaggatataaatttatctatatctttaaagttaaaaaaggagttggaggatgctggatatgctgtgtatatgacaagagaaggagattctcaattggacgcgaagaaagttaaagatctcaatgtcagatgtcaaatgaagaaggatgttaaatgtgatgcatttatatctatacatcagaatatgtttccgcagtctaattgctttgggtctcaagtttggtattcatcaaatgagatcagcaagtctttagcagaaaatattcaagcgtcacttaaagaaacaataaatgataataataagagagttcccaaggcagcaaaggaacaatatagaatacttagagatggatatgagggtgcatgtgttctcgtagaatgtggctttttatctaattatgaggaagagcaaaaactaaaaagtgatgaacatcaggacaaaatagcaaaaggaataacagctggtatcaataaatattttgaaagtaaagatagctagttatttaatttcataaaaataggaccaacttttatgctgttttttggatagtcataagagtgatataatttgtctactaataaaaaaagattatacaatagcaaacaggttaaaagaacaattaaaaagtaaattagtatagttaggaatttatctaaatttttggggttcataaattaacctctcaaatatataaaataattatatatgttgcaattgaatttctgtatttttaaaattcaatacttggcttacaagtgtttaaatgtaagccagttattgcaacatatatatatatataattatagtagtaatgaactataattatgagcgataaatttaaaaatagagaaagtatttagtaatattaagcaggaaaatactaaaaataatcatagagaatgctccgcttatgattataacgtgcagtatataccgcaatgttttgcatggggttctgagaatcattggattaaataaaatttatttggggttgtaaataataagaaatacttttaaacttatatgtagtaataagtataaatgtatagtttataagcgataataaaggagctgtaagaatgagagaaataaatgttgaacttataacagaagctattaaaaatttatcaattgaagctaattatttcttgggatcagatattaatgatgcattattaaatgctaagaaagaagaaccatggaaattagcatcagatgttttagataagatattagtaaattcagaaattgcaagaaatgaaaaaatgcctatgtgccaagatactggaatggcatgtgtatttattgaaataggacaagatgtccatttagttggtggaaggattgaagatgcgattaatgaaggtgtacgtaggggatatgaggaaggatttctaagaaaatcggtagtgaaagatccgataagaagagttaatacaaaggacaacactccagctataatatattatgacatagtggatggtgataaggttaagatcatattagcaccaaagggatttggttctgaaaatatgagtaaaataggtatgttaaagccatcagatggattagatggagtgaagaagttcataatagatacagttaaagcggcaggacctaacccatgccctcctatggtaataggtgttgggattggagggacttttgataaggcagcatacttagccaagaaagcattattaagacctatcaatataaggaatgaagataaattttataaggaattagaattggaactattacaagaagtaaataaattaggaattggaccacaaggcttcggaggtaaaacaactgcattaggattaaatatagagacttattcaacgcatattgcggggttacctgttgcggtaaatataaattgtcatgctactagacataaagaggtaatactataaaaactataatttaaataagatatatacaagttctaaataacatagctaattcttcataaattatctaactttcattatttgactatttatagataagcaattcaagaattttacttatacattggattagttctttaatttacttgagttagcttaatatatatgtcaagttcttgtttgggaaatctataagatgaagctgtgatgaattaaactttttagagttatatattttattagaagtctaactagtaagaatgtattagaaataaaaattgaaattatatgtatgattggagaaaaaggtatggaaattaaattagagacacctcttaatgaagaaaagatacgacaattaaaagcaggagatagtattttgttaagtgggataatatattctgctagagatgccgcacataaaagattaatagaattgcttgatgaagggaaggaactgccttttaatataaaagatcaggttatatactatgttggaccatcaccagctaagccgggtactgttataggatctgccggcccaacaactagctacagaatggatgcttatgcacctaaattaatggacattggactaaaaggaatgataggtaaaggtgcaagaaacgatgaagtaattagttcaatcaaaaggaatgaggcagtatactttggagcaattggaggagcagcggcactaataggaaaaagtattattaagtctgaaataatcgcttatgaagatttaggcgctgaagctataagaaaaatggaggtcaaggatatgcctctagttgttattatcgatgctcaaggaaataacttgtataaaattggtcaaagagaatatttagattcggtaaaataaattgaagttatatattaagccgtattaaaaggagaaatatatgagcagaattaagttaccaggaaaagagaaaaataaaagaatactattatttgtgctagtgttgatagcattagggataatagctcatgaatttatagaaaatagaaatagcaaggatagcaaatataaagaagaaaatgaaataataatgcctgagggaacgcaacaatcagataataatgtagccaataaagaactagaaagtatagatatgaagaatgattctaaaaaggctgttaatgataaaacaaatgaaaagtctagttattcggagagggaaaatgaattatacgacgaagcatataatttatttttttcacataagtacactgagtcaattagcaaagcagatttgcttataaatgaatttccaagtaatgcaatgggatataatataagaggaattgcgaagtcttataatggagattttaatagtggtatagatgatatggataaggcattaagtattgataataactatggatatgcaaggtttaataaagcactaacatatgaattatatggaaaaatggatgacgcacttgaatggtataataaggctttagatgttgaagattatgaatggagttattatggtatagcatctatttatggaagaagaggagatataaaaaatacaatgctatatttgaataaagcaatacaaatggatgaatcaataaaggatatagcaaaagaagagcaggattttgatccagttaaaaattcagaagaatttcaaaaagcagtgtataattaatttaatattagaagataagttcattgtaaaacaatattatgtgagacgtgaactttaggaggaatttgtatgttcaatgtattagtagttgatgacgaaaaggaaatacgagatgcaattgaaatatatttaagaggcgaaaatttaaaagtatttaaggctgaggatggattggaagctttagatattcttgaaaaagaaaagatacatttaattatactagatataatgatgcctagatttgatgggatacgtacttgtttaaagataagagaaagtcaaaacttacctataataatgttatctgcaaagggcgaagattcagataaaatattaggattaaatgtaggagcggatgattatataactaaaccatttaaccacttagaattggtagcaagagttaaatctcaattaagaagatatgagaaaccgctaaatgtagaagagggtaaggatataattaaagttaaagatttggtaatagatactgttgcaaaaaagattactttgcgaggagaagatgttaaggtaacagctacagaatacaaaatattatatttgctagcatcaaacttaggaaaagtattttctattaaagagatatacgaacacgtatgggaagagatattttacaaaagtgaaaatacagtaaccgtacatattaggagaataagagaaaaaattgaaataaacacaaaagagcctgaatatatcaaggtggtgtggggtattggatacaagattgaaaaggaagattaacctatattttagtagcatctatttagttgatataataattgtagcattgataacattatttttactttcaacattgggtgattatatacaaattaataggtcacaacacagtttagcagttaatagaattaaaagtgatttaagaggactaattttcttaactgctatatatgtggcgtttattacaaagattattttcatattgaaaaagaatcaaaattcacctagaatacaatctgattttgttaataatgtgatttttgtaattaaaaatgggtttcattataaagaaacaaggagcaaattaataatatcgattgcattagcattgatattgttaattgcatatttatattttcttgctactggaggatatgaaaataatatatttgtgaagttttttcaaacgtatccgtttaaaggaagtgtatttgttattataatattatttttcactatgatgtatgcattaaagaagactctagacataatagtggtaaatgatgcacttagaagagtcagtgaagggaatttgcaagatgatattaaattggatggatcgcctgcaataaaagagcttgcaaaaaatattaacttaataaaagcgggatataaggaaatattagaaaatggtgttcacaatgagaaactgaaaacagaattaatatcgaatgtatctcatgacttaaagacgccgctaacatcaattataaattatgttaacatactaaagaatagtgatataacagaggaagaaagagaagaatatttattaatattggaaagaaagtcactaaaattaaaagttttaattgaagatttatttgaaatgtcaaaaattaatagtggcaaaattaagctaaatagagagttaatagatatactatcgttaatacatcaaggtataggtgagtatagtactttatatgaggaaaaaaatatttcctttaaagtaacaagtgaagaagatgctgtatatatggaacttgatggaaaaatgatgtcaagagccttagaaaatataataattaatgcactaaagtattcaatgagcaatactagggtttatattaatgtaaaaatagatgatgattatgttaatgtcggcgtgaaaaatattgctaattacgaaatggattttaatgaagacgaaatgtttgaaagattcgcaagaggagataagtctagaaattctaaagtagaaggttcaggattaggtctggcaatcacaaagagtatagttgaacttcatggtggagaagttaaaataaaaaaagaaggagatatgtttaaaatttatcttatacttccaataaataagggataaaaaatattaataaataaattttatcaattaggtagttaatctatagaaaactaaagattagctacttttttcatatatatctataaattttaaggttttacaattatgatgctaacaattataatatacgatatgttgtatagaaaaattaaattacatacaaaaaacacaatatgtagtagggagagataattgaatgtcgcttttgagtgaattatgcaaagatgctattaatgcaattaaagataatgagggactttatacagaagataaactattagatgctttaaatccaattataagaaaagatatgaataaaagagaaataagaaattcattgatacaagtagcgctggaattaactacagatatggagcctaattggcaatatgtagcagctagagcgtatacatatgaactttatgatagagttagaagttctagaaatttagaggatgataagaatttataccagaattattacgaatttattgaatctctaactgaaagaggtctttatggagaatatattttgaagaattactcaagagatgatattttagaactggagaaggatataaagccggaaagggattttctatttaattatagtggaatcaatcttttagcaagcagatacttagttcaagattataatagaaaccctatagagcttcctcagcaaatgtttatgggaatagctatgcatcttgcaattccagagaaagaagaaaacagagtatattgggcaaagagattttatgatgtacttagttcgttaaaagccactatggcaactccaacaatgtctaatgcacgaaagccattttatcaattaagttcatgctttatagattcagtggaagatagtttagagggaatctataaatcgcttgataattttgctaaagtatctaaatttggcggtggaatgggtatatatatgggaaaaattagagcattaggttcaccaataagaggctttaagggagcatctggaggggtaataccatgggttaaattatttaatgatacagcaatagctgtagatcagttgggtgttagaaatggctcagtggcaatatggttagatgcatggcataaggatattcctgagtttcttcaaataagaaccaataatggtgatgataggaaaaaggcgcatgatgtatttccgggtatatgctatccagacctattttggaggcttgctgaaaatgatatagatgctaattggtatatgatgtgtccacatgagattaagactattaaaggatatgcattagaagacttttatggagagcaatgggaagaaaagtattatgaatgtgtaagtgatgagcgaatagagaaaagagtaatgtcagtaaaagatttagtgagattaatcataaagagtgcagttgaaacaggagcaccattcgcgttttatagagatatgacaaataaaatgaatcctaataagcataacggaatgatatattcatcaaatttatgcactgaaatcatgcagaatatgagtccgatgaagatacaaaagagtcaaattcttagtgataaagatgaatatgctgtggttgagaaaataataccaggagattttgttgtatgtaatctttcatcagtagtacttggaaatatagatgtatgtaatgatgaagaggtggaatatgttgttgaaactcagattagagcaatggataatgtaattgacttaaactattattcagttccttttgctgagattacgaacaaaaagtatagggcgataggtcttgggactagtggatatcatcatatgcttgttaacaataagatacattggacggaagaagatcataaaagttttgtagataaaatttatgagaagataaactactatgctataaaagccagtatgaacatatcaaaagaaaaaggattctatgaattgtttaagggatctgattgggatactggagagtactttagattaagaaactacaatagcgctaaatggaatgaactaaaggagctagttcatgaatttggaactagaaatggatatttaattgcagtagcaccaaatggttcgacggcaacaattgcaggaacaacagaaggaattgatcctattatggcaagattctatttagaagagaaaaagggaagtataattcctaagactgcaccaaatctctcagaagataattattggtattataattcggcttataatatagaacaaatgtggtgtgttaaaatgaacggaatacgtcagaggcatatagatcaagggcaatcctttaatctttatataacgagtagctatacaatgaggcaaataatgaacttatatatagaggcatgtaaatgtggcgttaaatctatatattatgtcagatcaaaatcattagaagtgacagaatgtgaaacttgttcagcgtaagagtactttgtaatctatggataaatagttgtcagaagggtttatacatagtgagattgataaacgagaactcaaattttatatttgggttctcaatctaatcaagttctttgatattacttggttatttgaacttatgaaaaataaaatatatgaataattatgatttgttaagatataaaatgtttagaattaattgctatataactaacatacgttagctatatagtacttagagaataggagtgcagatatgactataaataaaaaacctctttttaatgaattgggagatagagaaatcagtaaaaagagaattataaacgggaatactacaaacttaaatgattttaataatatgaaatatagctgggtctcagactggtataggcaaggaatgaataatttctggataccggaggaagtaaatctttcacaagatttaaaggattatcaaaacctattagaagaagaaagaattgcatatgataagatattgtcatttttaatatttctagattctatacaaacagcaaacttaagtaatataaataattatattacagcaagtgagataaatctttgtttaacaattcaaagttttcaagaagcagtacattcgcaaagctatagctacatgcttgatagcatatgttctcctgaaaaaaggaatgaaatattatatcaatggaaagatgatgagatactcttaaaaagaaataaattcataggagacttatacaatgaatttatagagaatccaacggaatacaatttattaagaacacttatggctaattacatattagaaggtatatatttttattctggatttatgttcttctataatctggagagaaatggtaatatgccaggatcagcacaagagattaggtatataaatagggatgaaaatactcatctttggctttttagaaatattataaaagagctacaaaatgaaaatccagagttatttactgaagaggtaaaaaatgaattaagagatatgatgaagattggtgtagaacaagaaattttatggggacattatgttataggagataagatacaaggaataaataagcaactaattgaaaattatattaaatatttaggaaataaaaggttgaaagaaataaatttatctccgttattcaaagaacaagataagaacccagcttcatgggtggatactctatcaaatgcaaattctgttaaaactgatttctttgaagcaaggtctacagcgtatgcaaaagtgacaactttaattgatgatttataaatagatttataaaatatagaaaataataggaaataagtagtaatagataaatgagggaatactttttttagtaaaaatcataaaaaacgattaaatttaagttaatttttttgtgaattatgttataatagaaaaggtttatacttaaaataaaacttgcaaatacacgaattaatgtaagaaatacttacttaataaatgaaatttacaatcaaggaggagttccatattatgaaaaaaggtattgctgcttctaaaggatatgcaataggaaaagtatttttacaagagcatgaggaaatcattataaatgacagtaaaattgcagatatagatgcagaaaaagcaaaaatgcaaaaagcattagatgattctaaagtacaattagaagctattaaggataaggcagaaaaagaaatgggtgcagagaaggcagctgtatttgaagcacacattacattattagatgacccagaatttactggagcaatgatgatggaaattgaaaacaatagtataaatggattaaaggctattgagagtgttgctaatacttttgttgctatatttgaatctatggataatgaatatatgagagaaagagctgctgatattaaagatgtatctaagagaatattatcaaattttgcaggtaagggcggagattcttttgcaattactgaagaaaacacagtagttgtagctcacgacttaactccatctgatacagcaggattagatagaactaaggttgttggatttataactaatataggtggaagaacttcacatgcagctataatggctagaactttagaaattccagcagtacttggattaggtgatataactacagctgttaaaacaggagatgcagttatagttgatggaataacaggagatgttattataaatccatcagaagaagttttagcagaatatagagagaaaaaagcaaaattccaagcagaacaagaagaattaaagaaattaatagatgttaaaacaactactaaatcaggtagaagaatagaagtttgcggaaacattggtaaaccagaggatgtactaggtgttttggcaaatggtggagacggtgtaggattattcagaacagagttcttatatatggatagagatagtgctccaacagaagacgaacaatatgaatcatataaattcgttcttgaaaaaatggaaggtaaacaagttgttataagaactttagatatcggaggagataaaacgcttccatatttaccattaccagaagaaatgaatccattcttaggatatagagcaataagactttgcttagatagaaaagacatatttaaagttcagttaagagcattgcttagagcttctatatatggaaatcttgcagttatgttcccaatgatttctggtttagaagaatttgagcaagcaaaagaagttgttgaagaatgtaaagcagaattaaaggctgaaggaaaagaatattcagaaaagatccaatggggtataatggttgagattccagcagcagcagtttatgcagatgaattagctaagcatgttgatttcttctcaataggaactaatgacttaattcaatacacattagcagctgatagaatgagcgaaaaagtttcatatctttataatccaatgcatccagcagtattaagattaataaagatgactattgatggagctcataaacacggtaagtgggttggaatgtgtggagaaatggctggagatgaagcagctatcccaacattagttgaatatggattagatgaattctcaatgagtgctacatcaatcttaaatgctaaaaaaataatgttagaacaagaataatatataatatatcgtttatgtaattaaggctatctcaaaattaattgaggtagctttaatttttatatttaattattataattgagtgcgatataatagatattatgaactggtaaaacatattgcattaagaattacaaaggggaattttatgaataagaaggttaaaagggctcatgataaagctatgagttactatgagatgggacaaatagataaagctttagaaatatgtgaagatatattattagaagggttggataacccaaatgtattaaactttaaagggcttttattatatcaaaagggtaatttagacgaagcagttacagcatggaaaatgaatagtgatttaaataatgatagtagtgcaaaaagttacataaatgattcaattttagatagaaagagattagagttatataggcagggtgaacaggcattaaagcagttaaagatcgataaagcattaaatatatttatgagatgtgcagaaagtgattttaattctattaaggtgaatactggaattgctatgtgctatcagaagaaaggtgatttctacagagcaagagaatatgcagagaaagcactaaatgtcgataaaaatgcaattacagcgaaaaatattgagaaggaattgaaagacagtggaacatttatagaagaaagaagctcatcaaagggtttaattggaataataattatggttatagtagctgctattgtagtgggcggatatacagttatatcaaaatataaaagtttaaataataccgttgaagaaacaacgaaagatgaaagtgatattaataaagaagctgatacatatgaggtaaaggataatacagaatctgctccagagacattaaaagaagaggtaaaagatgaacataataatattaactttaataaagataagatgatagcattaataaataacaatgatttagatggtatatatgaacaaataaaggatattaaacaggaatctataaatagtgatgatcaagaagtatataagcaagctgttgatttaataaaagatcaaggggtttcaagcttttatgaagatggattaaagagttttaatgaaaataaatattcagatgctaaagcctttttagataaagcgtatgcatactgtgaaggaaatagtttaaaagaacatatattattttatagagcaagcaactcttcaaagctatctgacaactctgaagctataaaacaatatgaggaatattatagtcagtatcctaatggtgtatatgtagaggaagcactctatgatctggcattattaaacagttccataaataaggataagagtaaacagtatgcaaatatactaataaataattatccagattcaatgtacgctaataataatataaaaaatatacttaatgaataagaaataagtttcaaattaaaaattacttattcttcttaatttaaaagcaaattactgtcatattaatatatctattaggaaaagataatcacataatcggcattttattattagatgtgatgatttagagtatttatttaaaataaaggataggtgagaatatgatttcaataattaaaggatgtaacgtgtatgcacctaagcatcttggaataaaagatgttgtgatagccgggggcaaaatagaagggatatatgaaaatcttaatattaaaattgctccgatagatgttgaggttattgatggaagaaataaattactttttccagggttcatagacggtcatgttcacattataggtgctggaggcgaaggtggatataatacaagaactcctgaaatgccattatctagcttggttaaggcgggaataaccacggttgtaggatgtataggaacagatggaacatgcagaagcatgaaagcattgatagcgaagtcgaaagcactaaaacaagatggcatgtctgcatactgttttactggttcatatgagttgcctgttaagactgtaacagactcaattaaaagcgatttaatgctgattgaagaaataattggaataggggaaatagctatttcagatcatagaagttctcagcaaacctttgaagtatttgcaaatgcagtagcagaaagtagagttggaggtcttctatcaaataagtgtggaattgttaatatacatttaggtgaaggaaacaggaaattaaattatttatttgaattgctagataagacggaaattcctgagactcagttattaccgactcatatcaatagaaacggtaagctatttaaggaaggcttagagtatgttagaaaaggtggtttcattgacttaacaaccagctgtgacctagagaacttaggagaaggcgaacttagagctggtgaaggattaaaaaaatacttagatgaaaaattacctatagaccatataactttcacttcagatggaaatggaagtatggagaaattcgataaagatggaaagctagaaggatatgaaatttgctcagtttcaacattatacagggaaattaaatatgcaattaatgaacaaaatgtgccaattgaagacgctattaaagtagtaacgtcaaatgttgcatcaatcatgaaatttaacaataaaggcacaattgagtcgggaaaagatgcagatttagtaatagttgacgaaaaatctttagatatagagatggtttttgcaaatggaaagaaaatgatggagaatggagaagtaattgtaaaaggattttttgaaaagtaattgtaataagagatgggttatatcatttttatttgatataacccattatttttaaattaatatatagaggctacacttttactttgaaaaaagtgtgatgccctataattttttcgttcactttttgtgtttctttcatccaatgacatgttgcggtagccggattatagaaaaataaggcatcatttgttggatcagcgcccctaatcgcatcgtatactgcattatagcaatcttgatctggattagcagttattttaccattcttaacacatgaaaaggcatttttttggaatataacttctctaatagtatttggaaaatgaggatcaatagtacgatttaatactacagaagctacagcaacctttccagcatatggttcaccaccactttcagcagatacaagttttgccattagatctatatcttcacccgttatatataattgttgagtatcatgtttgaaaacttctaaaacttcgttgtttttctcatcagactgagaattgtttatattagcacttaagtagtttactttcatttttggattttcataagtagtcttaatttcactatgagatccagctaaattagatgcaaatgctggattcatattaataacggaaagatatagtattaacgcagttacaaaaatactatatgtctttttcataaaaaacctccttcggtataatgcaacaaataatattattgccaaagaaagtaattatatacactatttattcgtataatcatttataggattttataacgatataaactataattaattaatagtaataaaaaattactataaaaataattaaaaagtaagaaaataataattctctttatatctaatagcatagtatttgttgtataattttattgtgagagaaaaagaggtgagaaatttgcaagaacttttaacaatgttaataaaaagcttttctaatatatcgatatggtccatattagatatactagtagtatcctatatattttataaaggatatatgttaataaaggaaacaagggcagaacaattattaaaaggaatagtattaattatagcacttattccaatcagttatttattaaaactagatatgttatattttatattaaataagacattaaccatcggggtattatctgtagttataatttttcaaccagagattagaagggctttagaacatttgggaagaagtgctttcgatgatcattatcttaataatagagaagattttaatactatgattaatgaaattacaattgctgtgcaaaacttagcagaaagcaaaacaggagctctaattgtaatggagcaaagtaccggtttgaatgaattaattggtgcaggaacagtattagatgccaaaatcacctcgaatcttttggaaaatatatttgttgttaatactcctctacatgatggagcaacaataataagaaataatagaattttagcatctggatgcgttttgccgcttactagtaataattctataaataagaaattaggaacaaggcatagggcagcgataggtttatcagaagtctctgatgcactagttataatcgtatctgaagaaacaggtgtagtatcgctagcgatcaacggaaaaattacaaggggatatgataaggatagattaaagcttatactgactaaggtagtagaaaatagaaaccaaaaaagagttaaaacggcgggagagaaggtgaggtcatggataaaagtgaaaacggaacgttaattgttaaaattatttgtttactgttatcagtggttctgtggctatatatctcgaatgttgagaacccactcaggacttatgaattaaaaggaataccagtagaattaactaatgaggattccctagtagattcaaaattcgcaattgtgaataagcagccatttacggtggatttaaaattagaggggccatcaagtgaaatattaaaggtgaaaaaagaggattttaagattgtagctgatatgtcggcttatgcacttaaagtaggggaaaatacaataccagtccaaatagtgagttatcctgaaaatataactataaagaataatggaatgttgggcataaaagttaacctagaggaattgactaaaaaggagcttacgataagttcaaaagtaaaagtaacttataaagaaaatatttatgaaaaagagcaaaacataagcccgaagaccgtaacaataacggggggtaaaagttctgtagataaggttactgaagctattttgactggcgaagaaaaagatgtagataaaaataagcaaggtgattataatatacaatttatagactcatttggaaatgcagttagcaatattgaatctaatataaaaaccgcaaagctatcaattactgttacgaatgggaagaccgtgccagttaatttaaagactacaggaaatgtacctcaagggtttgttttggatggatatgagttaagtaaaaataatgtgactgtattaggtgatagtcagattttaaataagttggaatcaatagatacagaggccgtggatatgtcatcattgcagcctgatagtgaagtcgatgtcaaacttaacttaccagaaggtatttcgataggtgatggagatggatcaattaaggctaaatttaaattaaagaaggaagagaatacaactaaaaatatagaatgcaatgttcagtacaagaatttaagtgatgtatttttggttacaaatcaaagtttagtatctaatgtaaaattatcaggtacacaagaagcattagataagataagttcacaaaatataagtgtcatactagatttagctaatgtaaaagaagaagggacttttgattatacacctcaggcaacacttgttaatgctaataatgtaacagtatcagatgttggaaatgttagtgtaacaataaagaagaagggataataataaaatcacagtattaataaatttattaatgctgtgattttttatgatataatttctttgaattagtttggagtaaggtaggatgggaaataataaataagatgtgaaatttgattgaataaatatataattatagattgtttgttgaaaggatatggtgagaagtctgtggctataagaataaataatataaatttaagtttagatgatgatttaaatattttagagaaaaaaatatgtaaaaagctaaatatatcaaaggaagatattagtaggttagatataattaagagaagtatagatgcaagaaaaaagaatgatataaaaataagctttagtgtcaatgtattttgtaaaaaagagaaaatattactatcaagaatacatgataaggatataagttttgaagaaattagagaaattgagtcaataaaaagtggtactgaagaaattaaagcgagaccagtagttgtaggatttggaccagcaggaatttttgcagcattaacattagcaaggtatggatatagaccaattgtgtatgaacgtggggaagatgtagataaaagaactgagactgtggaaaagttttggaaggatggatgtcttaatttagaatcaaatgttcaatttggagaaggaggagcaggcgcattttctgatggaaaattaactacaagaattaaagatcacaggtgttcatttgtccttgatgaactaataaaggcaggggcgccggcagaaattaaatatgagagcaaagctcatgttggaacagatcttttaaaaggcgtggttaagaatatcagagaagaaataaagagacttggaggcgaggttaattttaattctaagttagagaaaataacatataaagatggaaagttagagagcatagttgtcaatggaaagaatatcacatgtgaggctttagtgctagctataggacatagttcaagagatacatatgaaatgttatatagagaaaatgtatcaatggatgcaaaggcatttgcaataggggtaaggattgaacatccacaagaattaataaatattaaccaatatggcaacaattataatcaccctaaattacatgcagcagattacagacttacatatcaaagtgaaaagctaaaaagaggtgtgtattcattttgcatgtgccctggtggagtagtggttgcagcagcatcagaagaaggaagaattgtgtctaatggtatgagttatcatgcaagggatttagataatgcgaattcagcactagtggtaactgtctccccagaagattttgaaggaagttcaccccttagaggaatggaatttcaaaggcactatgaaagtttagcgtttaagctaggtggtggaaattataaagcacctgttcaattagtaggagactttatgaaggatagagtgtcaactaagttaggggaggtaatcccaagttatactgcagggtatgaattcagggaattaaaagaatgtttacctgattatgttgtagaagctcttaaagaagggattataaattttgataaaaagataaaagggtatgcaagagaagatgcaattttaacgggaattgaaacaagaacatcagcaccagttagattgaatagaaatgcttcgcttgaaagtataaatgtatgtggactttatccaactggagaaggggcaggatttgcaggcggtataatatcagcggctgttgacgggataaaggttgctgaacatataattgaaaaattcgatttaccaaagtaagattataaataacatgaatggaattagtataatcttttcagaagatgaggaagatatattatattacgttcatgttgtgaaattttataaaaataaatatataaaattaataagataataaaaacaatattctgaaaattcaacatttccaatatttttttgttacaataagatataaagaaatattcatagcattgattgatataaatttaacaaacaattaaattaattataaataaaagttaaaaattattaaagtagaggtgcaaaaaatgagtaaaaactttgatgagttattatcaagattaaaggaagttccaacaaaaaaagtggctgtagctgtagcacaagatgaaccagtattagaagctataaaagaagctacagaaaataacatcgcacaagcaatattggttggtgataaacaacaaatccatgaaatcgcaaagaaaataaacttggatttatctgattatgaaataatggatattaaagatccaaagaaagcaacattagaagcagtaaaattagtttctagtggtcatgcagatatgttaatgaaaggtctagttgatactgcaacattcctaagaagcgtattaaacaaagaggttggtcttagaacaggaaaattaatgtcccatgtagctgtgtttgatgtggaaggttgggatagactattatttttaactgatgcagcatttaatacatacccagaatttaaggataaagttggaatgataaataatgcagttgtagttgctcatgcatgtggaatagatgttccaagagtagcacctatatgcccagttgaagttgtaaatacaagtatgcaatcaacagttgatgctgcattgttagctaaaatgagtgatagggggcaaattaaaggatgcataattgatggaccttttgccttagataatgcaatatcagaagaagcagctcatcataaaggtgttacaggatcagtagcaggtaaagctgatatattattattaccaaatatagaagcagcaaatgtaatgtataagacattaacatatttctcaaaatcaagaaatggtggacttttagtaggtacatcagcaccagtaattttaacttcaagagcagattcattcgaaactaaagttaattcaattgctcttgcagcattagttgcagcaagaaataagtaataaatcaatccataataattaatgcataattaatggagagatttatatggaatttgcaatgcacttttagattctataataatttcttccgaaaattatgcattatgactgtatagaatgcattaaatttaagggggattcagaatgtcatataagctattaataatcaatccaggttcaacatcaacaaagattggtgtttacgaaggagaaaaggaactatttgaagaaactttaagacacacaaatgaagaaataaagagatatgatacaatatatgatcaattcgaatttagaaaagaagttatattaaatgttcttaaagaaaagaattttgatataaagactttaagtgctattgttggtagaggtggaatgcttagaccagttgaagggggaacatatgcagtaaatgatgcaatggttgaagatttaaaagttggagttcaaggacctcacgcttctaaccttggcggaataattgctaagtcaattggagatgaattaaatattccatcatttatagtagatccagttgttacagatgagttagcggatgtagcaagactatctggagtaccagaattaccaagaaaaagtaaattccatgctttaaatcaaaaagcagtagctaaaagatatggaaaagaaagtggacaaggatatgaaaacctaaatcttgtagttgtacatatgggtggaggcgtttcggttggtgctcacaatcatgggaaagttgtcgatgtaaataatgcattagatggagatggcccattctcaccagaaagagctggatcagttccaattggtgatttagttaaaatgtgttttagtggaaaatatagtgaagcagaagtatatggcaaggttgtaggaaaaggtggatttgttggttatctaaacacaaatgatgtaaaaggtgttattgataagatggaagaaggagataaagaatgtgaatcaatatacaaagcatttgtttatcaaatttcaaaagcaatcggagaaatgtcagttgtattagaaggtaaagttgatcaaattatttttaccggaggaattgcatactcaccaacacttgttccagaccttaaagcaaaagttgaatggatagccccagttacagtttatcctggagaagatgaattacttgctctagctcaaggtgctataagagtacttgatggagaagaacaagctaaggtttactagacgtaaagatgcacctagagatattttctaggtgtatttttttacataaaattcgcatatgtatatcgctaaactgtgaccaaatgatataataaaataatcgtaatgatatttagtaaagaataagtttaattggggtatgatatggatagatttaattgtattttgaatgacacggaatatatatattatctaaaaagaaataaaaagtttgaaaaagatagaaagttctgcaagcataatttaaagcactttttagatgtagcacgaatagcacaattaataaatattgaagaaagtttaggatttaacaaagaaatcatatatacgactgcaattctccatgatataggaaagtcgcttcagtatgaaaatggaacacctcatgaaatagcatcatgggagatttcaaaagaaattttacataattacagatataatgaggaagaaattgaaattataagacaaggaatactaggccatagagataaaaaaagtgaaaactttgcacagctcatgtatagagcagataaactctcacggctatgtattagctgtaagtctattgatgaatgtaattggggagatgaaaagaaaaattttaaaatatattattagaaggagctataagttaatgaaaataggaagtaaggaatttaatataggagaaaaaacatatattatgggaatattaaattttactccagattctttctcagatggaggaaaatttaatgacatcgatgttgctgtaaaacatgtgaaagaaatgatagatgatggagctgacataatagatgtaggaggggaatctacaaggccgggatataagatagtaagtgaagaagaagaaatttcaagagttgtacctataataaaagctataaaagaaaattttgatatatcagtatcaatagatacatataaagctaaagttgcagagcaggcaatacaagctggtgctgaccttattaatgatatatggggatttaaaaaagataaagatatggcaaaagttgcggcaaaatataatgtaccttgttgtctaatgcataatagagataatacagattataaaaatttagtggaagatatattaaatgatctgaaagaatgtattaatattgctaaggatgctggagtaaaagatgaaaatataatattagatccaggtataggtttcggaaagacctatgaacaaaatttagaaactatgaataacttagaaagaatcaaggacttgggatatccgatattacttggcacttccagaaagtctatgatagggttagctcttaatttacctgtagaggaaagaatagaggggacagttgcaacaacggttattggaataatgaaagatgcttgcgattttgtaagagttcatgatgtgcttgaaaattcaagagcagcaaagatgactgatgcaatcgtaagaagataggatggatgagttttggataagatgtatataagagagctagagttatttggatttcatggagttttcgaagaggaaaaaagattaggtcaaaagttcattttatcttttgagctagacatagatttgaaattagcaggaaaaactggagatttaactaaaacagttcattatggtgaattgtgtgaaaaaattgaagatgaatttaaaagaaagaactatgagcttatagaaacagcaactttaaatttagctgactttattcttaacgaatataagataatagaaggtgttaaggtgttcttaaaaaagccttgggcacctataaaaaaacatttagatactgtagaaataatgattgaaagaagaaggcacaaagcatatataagtttaggatctaatattgggaataaagaacagtatttagaggacgcaataaataaaatatctgcagaaaaaaatattgaaataataagaaagtcatcgtttattaaaacaaaaccatggggatacttagaacaggaagattttttaaatggtgttgtggaaatagaaactatattagaagcagaagaacttatggatgtattacttgtaattgaagcagatttagatagaaagaggactataaaatggggacctagaactattgatctggatattattatatatgattcagtggtttcttcaaatgaaaaggtgattctcccacacccaagaatgcatgagagagagtttgtattaaaaccattaagtgaaatagcaccatatcttatgcatcctgtgctcaataagagagtattcactcttttagaggagttagagaaaaaggaaaattaaaaacattaaacagcttattataaggtaggggtaattttatgagaagttcactaaagtttactaacaaattaaatatgttatctgaaatggaatgtgaatcaaagtttcaaatattggaatatgagaatttagacggagcgactgatgttcaaactgcttttggacttaacataatgaaaaagagtggtataaaattaaaacaagtgagaatattgctagaagatagttcggtaacacttgaagctggttctttgagctatatgaaagggaagattcaaataacaaataaatcaggtgggttgttgggacttggcaaaaagataatatcaagtaaattaataggagaaagtatatttaggcctacttatagtgggactggagaaatatttttagagccttcttttggtcattttgcattaatagaactagaggatgatgaaatagttgtgggagataatatgttttatgcatgtgaagaaggtatagaaattgatgcaacaatgcaaaaaaatgtatcatcagcttttctggggaatgaggggctgtatcaaactaggatagaaggtagcggaatagttgttcttaaggttccagttccagaaagtgaaatatttaaatgtatattaattaacgatactttaaaggtagatggaaactttgctatcttaaggactggaaacattgaattctcagtggagaaatcatctaaatcaattacaggaactgcagttagtggagaaggtatggttaatgtatatagaggtactggagaagtttggctagtacctacaaaaagcatatacaaggatttaaatattaagggattgggcgcgataagtggcataaatccagaaagtaatgttgaagacctataattagaatatatcaatagagtattataaatttaattaaagaagaagtgtattataaattttattttataataagcttcttctttgttttatgaattttatgtaattcatattaatatatgctttcgtatattaaagttgtaaagtaagctttagatggttataattaaagagaaaataagtattacaagaggtgataaagtgggttctttagagtcaaagctaaaaagtaaagaattagatttattttttaaatcaattttagaacttaaaaatatagatgaatgttataaattctttgaagatgtagcgacaataaatgaagttaaatcattagcacaaagattacatgtagcaaagttgcttaaaggtaaaaagacttattcagaaatagctgaaataactggagcgagcactgcaacgattagtagagttaatagatgtttaaattatggaagtgatggatataatttagttttagaaagattaaaagatgaaaatatagactaaataggcgctgattctaaaaatattattcttatgtgtaattgattgtaaaatagtaatattataacataaagagaagattgtaaatacgtgttaaaaatattatactatttaaggtaggcactgaggaaattacaaataatattatccattgtaagtgattaagtatattatagtaattgagtgactataacagaataaaaaagtgaggtaaaattatgggtagaatgtttggaactgatggcgttagaggagttgcaaatacagaattaacagcaagaattgcgtatgatcttggaagagcaggagcatatgtattaacagaaggagctcataagcctaaaatattagtggcaaaagatacaagaatatcaggagatatgttagaatcagcattaatagcaggaatactatcagttggagctgaagcaatagtgcttggagtagtacctacaccagctgttgcatacttaacaaggaaatatggagcagatgcgggtgttatgatttctgcatcacataatccagtagaatataatgggattaagttctttaacgataaagggtacaagctttcagatgaattggaagatgagattcaaagagttattgaaagtgattttgaaggagttccaagtccgacaggcacagatttgggaagagagacaattgaagtgtcagcattagatgattatatagaatttgctaaaaacacgataccttatagtttgaagggattaaagatagcattagattgtgccaatggagcggcatataaatcttcagtaaaggcgtttagagaactaggtgctgatgtgttcgtaattaatgataatccagatggaacaaatataaatgaaaattgtggatctacacatccagaagaattaatggaatatgtaattaaaaagaaatgcgatttaggttttgcctttgatggagatgcagatagatgtttagctgttgatgaaaaaggtaatttaataaatggtgattttatactaatgttatgtgcaaaatatttaaaagaacttggtaagttaaaagatgatacattagttgtaactgtaatgagtaatcttggattagatattgcatgcaaaaatgaaaaaataaacattgttaagactgctgttggagatagatatgttttagaagaaatggttaaaaacaaatatgtcttaggtggagaacaatcaggtcatgttatattcttagattataattcgactggagatggattagtaacagcgcttcaaattgcagggatagttaagaaaaaggaaaaagcattatctgaattatgttcaataatgaaggaattaccacaagttttagctaatgcaacaataccaaacgataaaaaagatttatatttgacagatgatgaaatacaaaacgaaataagaaaaatagaagaagctttaaatggtgttggaagagtacttataagaccatctggaactgaaccgctagtaagagtaatgcttgaaggagaaaatcaagcggaaatagatgaaatggctcataatttagcaaatttaatcgagaaaaaatataattaattaaaaaagtatatataactttgttaagaggaactctattaaatgagttcctcttttatttagctattcaaaagatatgaaactaatttaaaattcatataagtttatcataagtaatgtaaaataggactataagcttgatgctgacatataaaaattctgggatataaagatatttttgagttttaaacaaatgcagattgttttgttaaattttacacataattttttatgaataacaagtgagtaataaggggataaatagattaatacataaaataatacgttgataaaaggaggcatttatatggacaaagaaccttataatgaatatctagtagtgatgccaactggtaattgcaagggatttaatgatatagaaggagtaaaagcatatatcaatatgtattatgaattgcgtcttgatgatgtttttcataaggatggttataatgatgctactgaaataggtggagatgaatataggtacaacgtatttacacagttaggtgccgaagagggagcgaaatgcgaaatatataaaaccgcgtcattcattgaagaaattaataaagagttagtctttgaagatgagaaggaagaaataatttcaaagttatgcgaagcaaaaataaactttaacatatatgattacagtttggatacagttttagcaaacattcaagaggttgagtatatggaggactatggaacaaaaattagtaggatgtaataatcttaactaaaaccagataaaatgagcttatttaaattgttaattaaaactacatttaaaattaatataattaaattaagtctcgatgtattgatatatagttaaaaaaatgcatgaaaaaataacaaatagttaattttcatatattgtaaatatataaaaaaatgataatgaaaaatatattactaaaatgttgacaacaataagaaccgagagtacaatttagtctaacaggaaaatcaaataggtccttaagctataaaatgctgagatggagaaaattatttagtagataagttgcagagagtcgatggctggtgagaatcgatactttagctctataattatcactcctgagcagaatccagaaagaggaacaacgtttcttgagtaaaagatatccggtgtgcatccgttatatgcaagggtttgttagaacctagtgatattatgtaaggcggaatattatcccacttcttatgatttatatcattaagggtggatttttttaaccatttttaagggggggaaggcaatggagaagcatgtattatctgtcttagtaaagaattcatctggtgttttgagtagagtaagtggattgttttcaagaagaggatacaatatcgatagtttaactgttggtagaactgaagatcctttgatttcgagaatgacaattacacttatgggagacgagaatgtattagaacaggttaaaaagcaattaaacaaattagaagatgttataagggttataaactttaaagctgatgactctgtttatagagaattagtgctaattaaagtaaaggcaaatgcagaaaacagagcagcaataaatgaaactgtaaatatttttagaagcaagataattgacctgtctacagacactttaacgatagaattaactggggatgaaaataaaatatcagcattaataaacctgatggaggagtatggaatagaagaattggttagaacaggtgtgacagcactacaaagaggggaaaaaactataagaaattccattgaatcttattaatgtatattaaataaagataatctaaaagcaataaggcaataaaatgaaaagggggataatcatatatggctcagaatcaggtgaaaatatttgattctactctaagagatggagcccaaggtcaaggaatttcattttcattagaagataaaattaaaatagtaaaagttttggatgagattaaagttgattacattgaagctggtaatccaggatcaaatccgaaagatatggaattctttaaaaggcttaaggatgtggaacttaagaacgcaaaggtcgtagcatttggatctacacgaagacctaaaattaacgtagaagatgacaaaaatctaaaagatttactgtcatcaggggcagacacaattgttgtatttgggaagtcatgggactttcaagtaacagatattataaaaacttctttaagtgaaaatgtaaatatgataaaagacacaattgagtatttgtgtgttaaggggaaagaagtaatatttgatgcagaacatttttatgatggatataaagctaacaaagagtatgcgatggcaactttaaaggcagcagaagaagcaggggcaaaagtagttgtgctatgtgacactaatggaggaactttacctcaagagatatataacataactaaaagcataaaagaaacaatgaaggttgaactgggaattcatagccatgacgatatggggatggcagttgcaaattcgattatggcagtggaggcaggagcgagtcagattcaaggaacttttattggaataggagaaagatgcgggaatgctaatttaagcacaataatacctacattaaaactaaagcttggatataaagttttaaatgataacgagctagtaaatctaacaaaaacatctaggtatattgctgaaatttgtaatatcacattatcagatgaagatccatttgtaggaaattcagcgtttgctcataaaggtggaatgcatatagatgcagtaactaaatcaccaaaatcatatgaacatatagagccagaattggtagggaataagaggcgctttttagtatctgaggtaagtggtaaaagtacaattttacaggaaatacaaaagatatttcctaatatatctaaggatgataaatcggttcaaaaaattacagatagattgaaagaactagaatatgatgggtatcaatttgaaggagcagaaggaacagttgaattagttataagaaaaattattggaaagtacaaaccgttctttaaattgaatcattttaagatcattggtgaacaaccctatggatcagaggatttctcatcaacagcagtaataaatattacagttgatggacaaaatgagatgacagcagcagaaggggaaggacctgtgaatgctttagataaggctattaggaaagcactagaagttttttatccagaattaaaacaggcaagattagtagattataaagttagagttttggattcagaaagtgctactgaggcaaaggtaagagtattaattgaatcaacagatgggattgaaagttggagtactgttggggtatctcgggatgtaattcaagctagttggatagctctagtggattcaatagaatataaattaataaaagatattgaaagaaaagtaaaagcatatttttaagggggactaaaacatgggaatgacaatgactcaaaaaatcttagcagcacatgcgggattggaagctgtaaaagctggacaattaattgaagcaaatcttgatttagtattaggaaatgatattacaactccagtagctgtaaatgaatttaagaaatttggaacagataaagtatttagcaaaagccaaattgctatagtaccagatcactttactcctaacaaagatataaaggcagcagaacaagttaaatatattagagaatttgctcaaaatatggagatagaaaatttctttgaagttggagaaatgggaattgaacattgcctacttcctgaaaaaggactagttgttgctggagatgttgttataggagctgattcacatacatgtacttatggagcacttggggctttttcaacaggaataggatcaactgatatggcagctggtatggctacaggaaagtgttggtttaaggtaccatctgctttaaaattcgtacttaagaataaaccagcaaaatgggtaagtggtaaggatataatcttacacataatcggaatgattggtgttgacggtgctctatacaaatcaatggagtttgtaggtgatggtctacaatatctttcaatggatgatagatttacaatggccaatatggcaatagaggctggtggaaagaatggaattttcccagttgatgataaaactgaagaatatttaaaggatcatgcttctagagagtggaaggtttacgaagctgacgaagatgcagaatatgataaagtatttgaaattgatttaagtgaattaagaccaacagtttcatttcctcacttaccagacaatacaagaacaattgataatactggagatgtagctattgatcaggttgtaattggatcatgtacaaatggtagaatttcagatttaagaatagctagagatatcttaaaaggaaagaaagttaaaaagggtatcagatgtatagttatccctggaactcaaaagatttacttacaagcaataaaagaaggaatagttactgacttggtagaggctggagctgcattttcaacaccgacttgtggaccatgtttaggtggacatatgggaatcttagctaaaggtgaaagatgtgtatcgacaacaaacagaaattttgtaggaagaatgggacatgttgagtcagaagtatatctagcaagtccagcagtggcagcagcgtctgctctaactggaaaaataactgatcccgaattagtgtaggaggtatttagtaatgagcgtaaaaggtaaagtattcaaatatggtgataatgtagatacagacgtaataattccagcaagatatttaaacacttcggatgctaaagaacttgctgcacattgtatggaagatatagatgtggatttcgttaaaaatgtaaagagtggagatataattgtagcaaataagaattttggatgtggttcttcaagagaacatgcacctttagcaataaagacagcaggggttagctgcgttattgcatcaactttcgcaagaatattttatagaaatgcaatcaatattgggttaccaattttagaatgtgatgaagctgtaaaaaatattgatgcaggagatgaattagaagttgatttctcaacaggtattattaaaaatttaactaagagccaagagtatcaaggggaagcattccctgaatttatgcaaaaaatcatcgataatgatggattgattggatatataagaaatagatagaaaaactgattattaaaagaagaaccaaattaaactaatatattttcttaagagaaggatactaataactagaattaataattaaattttgattaaaaagcaataagaaataggtaattataagagggggattatcataatgaaatgtaatatagctgtaataccaggggatggaattggcccagaagtgatagatgaaacaataaaggttttaaaagttattggagataaatttgggcatagatttgaatatgaatatgtattagcaggtggatgcgctattgataaagaaggaactccgcttccagaagcaactttagaagcatgtaaaaaaagtgatgcagttctactaggagctgttggaggccctaagtgggatgatcctactgctaaaataagaccagagcaagcactactaggattaaggggtgcattaaatctttattgcaatttaagaccagcagtactatatgctccactaaaaaatgaatcaccacttaaagatagcattgttaaagatgggatagatatctgtatagttagagaattaacaggtggaatttactttggagaaagaggattggaagaagtagatggagtaaagagtgcttatgacactgaaagatataatgtaaatgaaataactagaattgctaaaataggatttgaaacagcaatgaaaagaaataagaagcttacaagtgtagataaagctaacatattagaaagttcgagactttggagaagcgtagttaacgagatggctaaggattacccagaagttgaagtaaatcatttgtatgttgataacactgccatgcagttagtaaaagatccaaatcaatttgatgtaattgtaacttcaaatatatttggagatatattatcagatgaagcaagtatggttacaggttcaataggtatgttaccttcagcatctcttggtgaaggaactcttggaatgtatgaaccaattcatggaagtgctcctgatatcgcaggacaaggaattgctaatccgttagcaactattctttcagcagcaatgatgcttaggtatagtttttcattagaggaagaagcaaaatctattgaaaaagcagttttagcagttcttgaagatggatatagaactggagatataatgactgaaggtaagaagaaagttggaacagttgaaatgggaaatctagttcgcgagaaattagaggcagcaaaatagaatgtaaaccaatttatacattgatagttatcaaacagagatcattttataagcaaaggagtgaataaaatgttattgacgggggctgaaatattaataaagtcattgcttgatgaaggagtagagactatatttggatatccaggtggggcagtattaaatatatatgatgagttatacaaatataaggataaaattcgtcatgttctcacttgtcatgagcaaggagcatcacatgcagctgatggatatgcaagggcaactggaaaagttggcgtttgtcttgcaacttcaggacctggagctaccaacttagtaacaggtattgccactgcatatatggattcaattccaatggttgctattactggaaatgtgtcaaagccattacttggaaaggatagttttcaagaggttgatataactggaattacaatgcctataacaaaacataattatattgtaagggatattaatgaacttcaggacataataagggaagctttttatatagctcaggaaggtagaccaggtccggtattaatagatattccaaaagatattactgctgaaaaaactcaatataataaaataattcctaaagaggtaattagaaaatcagagcatattacagaaaaatcattacaggaagctgttgagttaataaatcaaagtaagagacctcttatatatgcaggcggaggtataggcatatctggagcaacatctgaattaataaaatttgcggaaaagataagttgtcctgtatcaacatcgcttatgtgcatgtcagagtttccaaatgatcatgaattatatactggcatgataggaatgcatggaacaaaagcatcaaatattgctgcaactaaatgcgatttattaataactcttggagctagatttagtgatagagttataagcaaccaaaatcatataaagaatgcaaagatcttacaaatagatgttgatccagcagaaataaataaaaatataaaggttgatacatgtatcgtaggagatttgaaagtagcattgaatcaattaataccactaattaatgaaaagaaaaatgaagaatggttgaacactataaataatttaaaagagaataataaattagtgtcatgctgcgatttgactccggaattgttctttgataggttgaataaattaaatgatggaagttttataatttctactgaagttgggcaacatcaaatgtggacggctcaatatttcaattttaaaagtgaaagaacatttataacatcaggtgggcttggaactatgggatatggtcttggagcagcaattggagctcagataggcagatttgataaaagagtatttaatattgcaggagatggaagctttggaatgaactgcaatgaattagttactgctgttaaaaataatcttccattaattcaagttattatgaataataattgtttaggaatggtaaggcaatggcaggatttcttctacgaaggaagatattctgaaacaaccttagatagacctacagattacgttaagcttgctgaagcttttggagctaaagcatttagaataactcaagtagatgaaatagacgatatacttagaaaagctctggattcagaaggtccagttcttatagattatctaataaacagtgataaaaaagtttttcctatggttgcacctggtgcgccaattaaccaaataataagtgaagaagatattaatattaactaggaggtcattaaaatgccaaaaatgtattacgaaaaggacacagatttaaatttattaagaggaaagaaagttgctataataggatatggtagccaagggcatgcacatgcattaaatcttcatgaaagtggagtagatgttgttgttggattgtataacggaagtaaatcttgggctaaagcagaagcagcaggattacaagttgcaactgttgcagatgcagcaaaagcagcagatttaatcatgatcttattaccagatgaaaaacaagcaaaaatatataatgaagaaattgctccgaacttagaagaaggaaatgcactagtatttgcgcatggattcaacatacactttggtcaagtagttccaccttcatatgttgatgtatttatggttgctcctaaaggaccaggacatttagtaagaagaacatatactgaaggtgctggagtaccttgtttaatagctgtacatcaggatgcaacaggaaaagctaaacaatatgcattagcatatgctaatggaattggaggagcaagagcaggagttcttgaaactacatttaaagatgaaacagaaactgatttattcggagaacaagcagtactttgtggtggggtttcagaacttatcaaggctggatttgaaactttagtagaagcaggatatgctccagaaaatgcttactttgaatgtatgcatgaaatgaaattaatcgttgatttattataccaaggtggattaagcatgatgagatattcaatttcagacactgctgaatatggagattaccaaattggtagaagaatcatcacagatgaaacaaagaaagaaatgaagaaagttcttactgaaattcaagacggaacatttgctaaaaactggttattagaaaaccaaactaatagaccaggatttaatgcaagaagaagaatggaagcagaacatccaattgaaaaagttggtaaggaattaagaggaatgatgagctggattgatacagctaaagtagactaatattaaaaatttttagaagacgagattcgtagatgatcgtcttcttttttgatataattttattaagatattaaattataagtaaagagttgaggtaatacatgaattatgtgtatattgtagaatgttcagatagaacactttatacaggatggacaaataacttaagaaaaagaattcaaatgcattcggatggatgtggagcaaagtatacaaggggtagagggccagttaaattagtatatcatgaagtgtttgaagatagaaaagatgcaatgaaaagagagtatgaaataaaaaagttaacaagaaaagataagttaatattaataagttcgtataaaggcgaaaatagatattaataacttagaggaatctatgcaaccgtttttataaagaggcatatgattgagtaaatcgtaacaaaacatagaaaagctattaaatttaatcaaaaacaaaggaaaatgtaatttgtaaaagttttctttggttgatatacttatatcaataagagttagatttgcctaagaaaaggttaacaaatgaggtctggatagcttaatatgctaaaaaggctacatttttttcaaattttcgcaatcgtttgcgaagaagaatcgattaacatacatgcttaaataagtttttaagtatgtgttatataaatatatgtttggtattcttgaaaatcatttagaatgctaaacaaaattttaatggaggggtatttaaatgaaaacaaaacaaatattatcaacaattttagcttctacattattggcgggtactatggttggatgcggaagctcatcaggagcaagttcgcaaagttcaagcgatgctggaagtggaaaaacaattaaagtatatcaattaaaggttgaaattaatgatgcacttcaagaacttgctaaaaaatatgaaaaagaaaaaggcgtaaaagtcgaagttacttcagttggcggtggagctgattatggcgcatcgttaaaggcagaatttcaaaagggtacggaaccagatatatttatgattcaaggagctggggattatgaaacttggaaacataaaattgatgatttaagcgatcaaggctgggttaaaaatgctgttaaaggaacgctagatacagtaactatagacggaaaagtatatggaatgccagcagcaacagaagggtatggcttgttatataataaagatattttggacaaggctggtatcgatcccaaatctttagattcttttgataaattgaaagcagcgtttgagacattagatagtaaaaaagctgaattaggacttgataatgttgtttcttatacaacaaaagaattctgggttactggtaatcatacatttaatataccacttgcaactcaagataatccggctcaatttacaaaggactatcttgcaggcaaagcagatatagttaataataagcaatttaatgactggatgaacttagttgaattactttgcaaatatggtggaggaaagaatctagacactatagattatagtactcaagttggtaactttgcacttggaaagacagcattcttgcatcaaggtaactgggttgctggggatttacaaaagctagaagatccaaataagaagttccatatgggatttgcaccacttgcaattaataatgatccaaaaatgagtggatctattccagtaggtgttccaatgtattgggtagtaaataaagattctaaaattaataaagaagctaaagaattcttagattggatggttacaagtcaaacaggtcaagaagcattagttaaggatatgaatatgattccagcatttacaaactttacagttgaaagtgataatgaattaaataagtcaatttctgaatataacaaagaaggaaagactcttccttgggcattcactaatctaccagatggatttaacaagaatagcttagcacctttattctctaaatttattaatactgatatggggccacaagcaaagaaggatatgttacaaggaattcaggatgctacaaaagctaaataatattagataagatttattcatgaggggattaatacctcctcatgaattttgtataaatatttaaaattataagatagcgctgaatgctattaggaaaggagtaagtgtatgagtaagaaatcacgagatattaaagatttttggatttttgtcgggccagctttatttgctatgacaatggttgtaataattccgtttataataggtatatattatacatttacaaattggaatggtgctaatcctcattatgattttgttggaataaaaaattacacaggaatctttaaagatgtacaatttatctattctttaaagataacagtattatatacaattgctagtgtaataactataaatataataggatttggactagcttatatagtaactagaaaattaaaaactagtagtttcttaagaaccggattctttatgccaaacttaataggaggattaattttaggttttatatggcaatttatgttcaattcagtatttacaggagttggtaaagcattgggaagtgcaacactttcaacatcacttttacaagctccaactacggcaatgctagcaatgctgatagtttcgacatggcaatatgctggatatataatggttatttatgtggcagcccttgaaaatgttccaactgacttaatagaagcagcgcatattgatggagctaatgggtggcatacgtttagaaatataacaatacctatggttagacaagcggtcacaatttgcttattcttgactttagcaaattcatttaagttatttgatttgaatttttcacttacaccaatgaaaaccactgaaatgttagcattaaatatttacaatgaagcatttattgtgaataatatgggaataggacaagcaaaagctattatattctttgtactagtaactactatttctttaactcaagtttactttaataagaaaaaggaggtagaggtataatggagccaagtaaagttgttaataatatagaaaaagttaaagcaaataaaaagctaaagacactagatagttatactggcagattaaaactattagaagtattttcatggttactattgatagcatatatgacaccattttacttgatgcttataaattcatttaagacaagaagagagattttttcaaacacaactggtcttcctgacacttggaattttcagaattatttagatgctatgaaaaaaatgagtataataagttcatttgcaaattctatgataataactataggaagtgtggtactaataattcttttttcatcaatggcttcatggatgttagtaagggatcagtcaagaaagagtaagataatattttatatatttacttcgggaatgattgttccatttcaagcagtaatgataccacttgtaaaatggatggcaaaaatccagtttggaccatttcaaatgctaggaacacactatgggcttatttttatgtacatagggtttggggttagcatgagcatattcttatatcatggtttcattaaaggagtaccaaaagaagtcgaagaagcggcaactatagatggatgcagtaaatggcagacatatatgaaaattctattgccattattaaagccaattactgttacagttgcagttttaaatagtatatggatatggaatgactttttgctaccatttttaactataaacggaaagataaatactataccattagctatgaataattttttcggagcgttttcaaaacaatgggaattagcaatggcagcattaattttagcaataattccaataatcatattctatttctttgttcagaagcatattattgcaggtattgttcaaggatctataaaatagtcattaagagagagtatattagctatggttactatattcttattaatgtagtttgatatgtttctttgcgcaagcggttgctttaggcatgaagagagtaaagattagttatagaaataaatttaaaacaaacgttggaaattaggaggaatatatgaatagaagtagtggtataataatgcacattgcttctctgccaggaaagtatggaatagggacatttggtaaagaagcatataaatttggagattttctaaaaaaggcggggcagaagtattggcagatactgccgctagggcctacaagttttggagattcaccatatcaatctttctcggcatttgctgggaatccatattttatagattttgatattttaagacacgatggatttttagatgaaagcgattattcttcagtaaactttgggaaagtttcagaggatatagattatggtttgatttttaaagaaaaattaagggtattaaaaatagcatacgaaaaatttaaattaagacaagataatgatttaattaattttcaagaagctgaggcccattggcttgatgattatgcattatatatgtcagtaaaaaaacattttgatttgaagagctggtatgaatgggatgaagacattaggttaagaaaaccagaggcaataaataggtataaaatcttattagaagatgaaataggattttggaagtttttgcaatatgagttctataaacaatggaatcatttaaaagcctatattaataatttgggaattgaaataataggggacatgcctatatatgtagcagaagatagtgctgatgtatggggaaacccagaggcattcttacttaataaggaaacactaaaaccattaaaagttgctggatgtcctcctgatatatttgctgccacaggacaattgtggggaaatccaatttatgattggtgctatatggagaaaacgaattataaatggtgggttgatcgcataagacaaagtttgaacttatatgatgtacttagaatagatcattttaaagggtttgaatcatattggtctattccttatggagatctaacagcagaaaatggtgaatgggttaaaggccctggaataaaagtttttaatgcaatcaaagatgagcttgatgaagttaatataatcgcagaagatttaggcacacttactgaagaaacaataaagcttagaaatgatacagggtttcctggaatgaagatattgacatttgggtttgattcagatagctcaaatccttttttgcctcataattatgaaaagaactttatagtttatactggtacacacgataatgatactgtaagaggatggattgaaaaaacagcacctaaagaagaagttcaaagagcaatagcgtatttaggtctaaataaagaagaagggtataactggggatttattaggggcgcttggagtagcatcgcgaatatttccatagcacaaatgcaagatttcttgaatttaggaaatgaagcaagaattaatttgccttcaacattggggaataattggcgttggagagtaaagaaagatgtattgacagatcagttagcggaaaaaattcatcagattactagaacttatggaaggtgtgataattagcaggtactataacaaaagtaaaggataatgataatttatataaaagataatctctgcaataatatatacttattaattattgtggagattagctatatatctacttgttaattagaggggtgcttaagtttatacttcatagtaataaaaagaaagattatttaattgttgtttaataaaaccatatatatgggaattgtaacatcattttaagtatgttaatattaaaattattagaggaaaatagttacaaagcatagcatatataagtttttactgtcattaagtgattattcctaaaaagatagtatattagaatgcgatttagatgtttttatgttagtaaactttataagtaatttattattgagaataggagtaagttatgaaagttacaataaaggaagtagcaagagaagcgaatgtatctccatcaactgtatcgagagttatatcagatagttcacagataagtgaagaaactaaggaaagagttagagatgcgataaagagattgaaatacaagccaaatgcgatagctaggagcctggcaaataagaaaagcagaatattaggtgtagttttacctaatgaggctcaagacttaatcactaacacgttttttattcaagctatgaaagggatgagcaaatatgctcaaaataagaagtactatattacatatgcatttagtgaggatgaaaaggctgaattagaatatataaataatttcataacaagtaacttagttgatggaatatgcttattacgtgcaagaactgatgatagaagtattaaatatcttaaggaaacacaattcccatttgtagtaataggaagaccggaagaatcggaaaatttgctatgggttgataatgacaattttcaggctacttacaatctagtaaatgaacttgtaaagaaaggacataaatctattgcttttctaggcgcaaagaaggaatggaatgttacaaaagatagatttaaaggattcaaagttgcatgcgaaattaacggaatttcaatacacgataaaaattttgcgattatggatgattttaatgaaaaggaaggaatagatggaacaattaaattgttagaaaatattactcctacagccataatagcagaggatgacgtattagcatttggtacgcttaaggtactcaatgagagaaaaattaataatatagatgtggtgggatttaataatagtccattagctgagcttcaagtaccatcattatcatcagttgacattaagtcagaagaactagggtattatgctacaaaaattttgatagattttctagaaaataatgatacagcgataaaccactatattatagatactaagttagtaaaaagagaatcgtttaagtaacaaaatgtggtatttaagtttagtatgtgttcatatggttgcaggtaattgatgagagttaaaactttatcagcacttattgggttttattaaatattaggaatacattttaaatagaggaattcttttacgaacaaatattgtttggatttagagggagtatcacatataaaatatagaatgaaaatgtataatatgttagtatttgtataaagataactcaaaactaaaaagttaggggtctatatatgaatgataaaaactctaggatcagccatggagaaacatacataagagataataagaaaaaaagtaattattcgaaatatataacttttatattggtaactatattagtcttaactagttctttaatctatttaaagtatagagaaggattaagcaataaaaaaaatacagctaacgataaagtaaatggagaaactgataagtcaattgatgatgataagtataaagctaatcaactcaaagaaccaataaagaaaacgattgttatttctttcgcaggggacttcactttagggactgacactaaattcccttatgatggtagcctaccagcagtgtttataggcagtggaaagaattattcttatttcatgcaaaatgtatcgagcgtatttagtaaagatgactatacattagtgaatttagaaactacatttacagattccaaagataaagcacataaagatggagaagtattttataattttaaaggacctaaggaatacgttaacattcttactagcggatcaatagaaggtgttacgatagcaaataatcatatctatgattatggaaagcaagggataaatgacactattaatactttaaaagaaaagaatattgatatatgtggtgaaggatataaaatattaaaggatattcaaggaataaaatttggatttttagggtatacaggttgggaatattctaataatttaaaatctaaaataataagcgatattagtgagttaagaaagcagggagcagaagttgttattccatactttcattggggagtagagagaaaatatgagccagatgatgttcaaaaaagtttagctagattttctatagataatggggctgatgcggttattggttctcatccacatgtaattgaaagtatggaaaactataaggggaaatttatagcatattctatgggaaacttttgttttggaggaaattctaatccatcagataaaagaacgcttatacttcaaattaaagttaatattgaagatgataaattatctagtcttgagtataaagtaattccagcaatgatctcttcaagaaatgataaaaatgattatattccaactttagcaggtggtgataataggactgaaatattaggggaattaaatgaattatcgccgacgctaaatggaaatattaaagatgagttttttaaaattaaatagaattttattgatattaaatatagaaggctgctttgaaataattacttcgaagcagcctttatgttaagtggaattattcataacatgtctttagccatattattgttacagaattgaaaggtaaatgtaaggtttatcaatataagaataattaaacttaggttattatataagtgatatgacaggaactgatttatattaagtttttatttaaggaaaaattaatgttttattaagggttatgttaaagcattagtgatatactgaggaatattaggttaataaagttacataaattcaatataatggaagtctgttggatagtgtaagaattaatgatgcttaaagagtaacatatatatgacaatgttagttaattactattacatggataaaaaggctgttaagaatagggggaagttttaaagatgccgaaattagatgtgaaaaagttaaaacctaagggcataagtcttaaagggatgaaactaaaaaagaagccaagcaaaaaagtaatattaatatgtacaatatttataatagttggagctattataataggaaagtttgttatgcctaagtcagttccgcaagtaaagtgtacagttctttctaaggggaagattgtaaatagtgttaatgttttgggagaaataaaaagtaaagaatcgactaatatatacagtactttaaacaatccagtccaagaggtaaaagtaaaagagggagataaggttaaagttggagatgttctagcggtactagattcaaatgggttagaaaaagatattgaacaggctacagctacagcagatgcaactgaagctaatgctaagacacagcttgattcagctcaaaaagaatataatgatgaattgaatttatataatagcaattcaaatgcagatattaaaaatgcagaagaaacactaagtttagcacaaattactcttgatgataaagcgaaaatatatgataagaataaagctttatttaacgctcaagcaatttcagagagcgacttaaataagataaagatagattatgacactgctaaatcagattatgaaaaggctgtaacagctcttgaaaatgctaaggttaaagttgaccaagctcttaataaagctaaaagtgactatgaaacagcacaaacaaactataataataaaagccagagaattgcgattgagaagcaaaaacagcagctagatgattgcaatattaaggctacaagtgatgggatagttacaaatgtaaatgctgttgttggaaattcaggaaatggagttttatttcagatcgaaaatttagataatatagaaataactgtgccaattaaggaagtcgacatagctaatgttaaagtaggacagagagcagagataaaaacagatgcaacaggtgataagacttttccaggagaagtagaaagtgttagtcaatctgctagaaaagaaggtatgtctgtaagtacgagtcaatctgggaatacacaatctcagtctcaaggaacaagttcagatgcaggctttgaggcaaaagttaaagttgataatacagatgaaaatatgaaagtgggaatgagtgcaagagtaaatattattacaaatgaaaaatctgatatttataccgtttcatcagatagcatagttgaaaatgaagatagcaagagtatatatgttgcagaaaaaagcagtgaaaagccaaatgaatatataattaaggaattaccaatagagacaggacttgaatctgactttaatgttgaaatttcaggagaaggaatttcagatggaatatttgtaattgatgatccttcaacacataagcctggagagaaagttcaaataaaaggaaggtgagttctttgaatgaaaatataatagaaatgaagaatattgtcaaaagcttttatgttgggactcctaatcaattaaatattcttaaaaatatagatataacaataaaagaaggtgaatttgtatctatagttggtgcatcaggatcaggaaagagtactttaatgaacattattggagcacttgacaggccaacttctggaacatattttttagatgggactaatgttaatgaagaaacagacaatggtttatcagaagttagaaataaacaaataggctttgtatttcaaacttataatttaattccaagaagttcagctttgaaaaatgttgagttgccaatgctttattatggaatgaataggaatgaaagaaggaaaagatcagaagaacttttggaacttgttggaatgaaggatagaatgaaacatcttcctaatgaattatcaggtggacaaaaacagagggttgcaattgctcgtgcacttgcaaataatccaagtataatacttgccgatgaaccaacaggagcccttgattctgcaacaggcaggatggttatggatttgtttcataaggttcatgaattagaaggtaagactatagtatttataactcataattatgagctggcaaaagaaacagagagaattataacattaagggatggaaagataatatcagaagaagataacgacaagtatgtaagaaaatttccagatggtgaaaagatatgtttataaaagaaaatatattgcttgcaatagcaggcataaaatcaagcaagatgcgttcacttttaactatgcttgggattataataggaatatcatctgttataggaattgtttctattggaggtgcaattacatctaaagtaacaagcgagttggacaacatgggtgcaaataatatggaagttgtcttaactgaaaaaaaagatgatggaacctctgcaggatttaatgatggaccaagtaaacagccagaagatagcgatcttatatcttcagagcaaatagactcatttaaagaaatatttaaggatagaattagcagtgtaagtatagatgagacaaaaggacagggaaaggtaagggatggatatttatatgctaatgtaaatactattggagtaaatgagggatacaaagaagttaataatgtaaaactggctagtgggagatttatcactgataaagatcttaaaggcgcgaaaaaaattgctatagtgtctgataaacttattaataatatctttaaaggaaagactgatccactaggtaaagaaataaaggtttatacaaaagatgaagttgaaacatatgtaattgtaggggtatatgaatatgaaaattcttcactatttggtggaggtggtatggcatcagaaaaagatagagttactgatttatatattcctgtaacaacagaaaaagcatcacaaaaaaacaagaattatcaatactttactattacgcctaaacaaaatgttgatgctcaaaagcttgtaaaagacatgaaaaaatatggggaaaagctatacaaaagcaataagaattggacaatagatgtttttaataatcaaagtcgagcggcgtcttttacgtcagtgattaatatgatatcccttggtgtagcagtaattgcagccatagcattacttgtaggtggaataggagtaatgaatataatgctcgtatctgttacggaaagaacgagggaaataggaacgcgaaaagcccttggtgctaagagcagtcatataaagatgcaatttataactgagtcagtgataatatgttcaattggtggaacgataggaataatatttggaataggcatgggagtaattgcatgcatagtactaaaatcaccaatatcaatatctattccaacaattataataagctttaccttctcaatggcaatcggtgtgttctttgggtattacccagctaaaaaagcggcaagtcttgatccgattgaagctttaagatatgagtaagcagcatgaaaaggtaggaaataaaaaataaggaatatatattctaagaagtttaattcatcgaagctcaccttaaacttagtggatagtgaaaattagatatcctatgatgaatgaattgtattatttaaaacgtatatgtaaagtataatttatgttatagaggttaaattaagaaagatagatattttaattttactaataattaaaatatctatctattttcttattctgaataaattttaagataggaataaaactttaataatctaattacatagaaagtcgatatttttactaataattattgacaagtttctgtaactatgtataattaatattaacaaaaaaatatctggataagttaatcttattaagagtggtggagggactggccctttgaagcccggcaacctgaaaagttttatatataaattttttcgttggtgctaaatcctgcaagagaatatcttgaaaaatgagaggaattaagttttggtagaacttataatatgactacaaagtcacttcttgttttggaagtggctttttttattaatattatctctggtattagcaataagtaatacattaagcaaagtaaatttaaggaggcaaaataatgactttaaaaaaatcttttgaaacaattgcagtaagtggagtatcaggtggagataaagaaacgggtgctataagttttcctatatatcaggcggccacatttaaacatcatggacttaataatagcacaggatatgattatgcaagagctcaaaatccgactagagaagaagctgaaaaaacattagctgttttagaaggtggaaaatcagcgatagggttttcgtcaggagttgcagcaattacagcctgtatacatttatttaagtctggagatcatataatcttatctgatgatttatatggtgggacatatagattgtttgatgatatttttagggattttggattagaagctaccttcgttgatactacaattaataaaaatatattgaattcgataaaagaaaatacaaaggcaatacttatagaaactccatctaaccctatgatgaaggtaacagatataagagcagttgcagaaataacaaaaacaaataatttactgttaattgtggataatactttcttaactccgtactatcaaagaccactagaactaggagcagatttagttgttcacagtggaacaaagtttttaggtgggcatcatgatttacttgcagggttcatagtagcaaatgatgaagaaatattagaaaaattaagaagaattcacatgtcaacaggagcaactttatctccctttgattcatggttaattttaagggggataaagactttacatataaggttggaaaggtcacaagagaatacacttaagatagctaagtttttagaaggtaatcctaaagtagaaaaggtgtattacgtaggtctagaaggttttgaaggctatgaattaaataagaaacaatctacaggttttggagcaacattatcgtttagagtaaaagaaaaagaattagttgccaagattttagaaagagttaaagtaataagatttgcagagagcctagggggagtagagacattaataacatatccatttactcaaacacattcagagataccggaagaaattaagcaaagacttggagtagatgaatatctgcttagattatcagtaggaatagagaatatagaagatttgctaaaggatttagaaaatgctataggaaaataaaatttataattaaaatagaatggggcgttaaatatgaattttggaactaaattaatacatgcaagtggggatatagatccgacaacgggatcagtaagcactccaatatatcagacatcaacatttcaccaatttgatatagagaatttcggaaaatacgattatgcaagatcaggtaatccaaccagagatgtggtagagaaattaattgcagaacttgagggtggcgagcttggatttgcatttgcatcaggaatggcagctatttgctctgtattatcaatattctctgcaggagatcatattataatatgtggagatgtatatggtggaacatatagagctactacaaaattattctcaagatttaatatagaattcacttttgtagatgcatcaaatattgatgaaatagaaaaagcgttcaaagaaaatactaaaggtctttatttagagacaccttcaaatccactgctaaaagttatagatttaaggacagctagtaaattagctaaagaaaatggagcaataactatagtggataatacatttatgtcaccatacctgcaaagacctattgaactaggagtagatattgttgttcacagcgcaactaagtttcttggtgggcatagcgatgttatagcaggtcttgttgtaactaaaacaaaggaattaggagatagagtttatcaaatacaaaatacttttggtgcagtacttggaccacaagactcgtggcttttagttagaggtatcaaaacattaaaagttagattagatgcacttcaaaaaagtgctcaaaagttagcagaatggcttgaatctagagaagaggttgaaaaagtatattatcttggattaccttctatggaaggaagagaactgcatttagaacaagcggatggagcaggtgctgtattatcatttaaattcaaaacatttgaaagaacaaaaatatttttaaataatgtaaagaatgtagcggtagctgttagcttgggtagtgttgaaactatagtttcatatccagctaagatgagtcatgcctcaattccaaaagaagaaagagaagagcttggaataacagatacattgataagggtatctgtaggattagaagatatagatgatttaatagagtcatttagagaagcaatggaaaaataaagattacagagataagttatatataaaagttgatgaaaaaggtgatttatataatcatccttttttcatgcttctgattagaggaataattcgattaaatttggtgaaatgaaagaaatacaattaatcgaaatattataatttagaaaatatactttatataagcaaatgattaggtaagtgttaatttaatttttttaatatacttataaggtttattatagaatcatctaatgtaattacttcatcatcagaaagagaagagattttttcagcaaaagaattacaaattgcattacggagagaatttagtaaatcataagcttttggtgttagctcaactctaagaacccttctatcattagggtctgggtatctattaactagttcataattaatgaggttttctataattggagtcatattagattttgatatgcctatattatctgctatttgagaaataggagatgaattactgtgaaaaagatagaatataactctggcatgtgaaggaggaatagaaaaatcagagcaacattgtttgctattttcatgcaatgattgaaaaattttagatatatcttgtactttgaatatattactttaaataatccataaaaagttaactaaggaatctgcaactttaaataaattttctttttccatattaaaacaaatccttcccgaggtggtatattagtaaattataaactattgataaattgaagacaatagataaggattattgtaatatttaatatacttaataggtttaaaaaacttattaagtatatttttttgctttgtaaagataataaaagtatgctttcttttcgatcattttaggctataaccatgtattttcaacagtttaacattaactttaaatttgtcattgaaaacgtaactcaaatttgaagttgtttgaattgaaaaggtattcttcatagtttaagatagtaaatgaaagaactaataataattatataaataaaaatagatggaggttttattatggaaactaacaaatcgtctcttaaaggaagcgtgcaaagattaggtagttttttaagcggtatggtattacctaacattggtgcatttattgcttggggtttaattacagctttattcattccaacaggttggatgccaaatgaatatttaggcaagttagtagacccaatgataaagtatttattaccattacttattggttatactggtggtaaaatggtatacggacacagaggtggcgttgttggtgcaatagctacagcaggtgttataatcggtgcttctattccaatgttcttaggagcaatgattatgggacctcttggtggatatgttatcaagaaggttgaccaattatttgaaggaaaaattccaacaggttttgaaatgttagttaataacttttcagctggtatttttggtggacttgtatcaatcttagcgtatacttgtattgaaccagtagttactgcattttcaaatggtttaggaagtttagcaactgtagttacaaatatgggtcttttaccattaatagacatatttattgagcctgctaagatattattcttaaacaatgcaattaatcatggaatattaactccacttggagtacaacaggcgcaagaagttggtaagtcaatattcttcttacttgaagcaaatccaggtccagggcttggtatacttttagcttatactttattcggaaaaggaaatgcgaaacaatcagctccaggagctataataattcacttccttggaggaatacatgaaatatatttcccttacattttaatgaaaccagtattaatactagcagcaatagctggtggaatatgtgcagatttagtttttgtattaactcatgcaggtcttagagcagcagcatctccaggaagtatatttgcagtattaactatgacagcaagtgattcatatttaggagttttagcaggtgttgcagtaggaacaattgtatcattcctagttgcatcagtaattcttaaggcatcaaaggacaatggagaaggagaaaatcttgaagaagctcaagctaagatgaaaggtatgaaagcagaaagcaaaggtgcaaaagcttcagaaactgcagttaatgtatcaaaagctgatgttaaattaatagtttttgcttgtgatgcaggtatgggatcttctgcaatgggagaatctattcttaaaaaggcattaaaagatgctggaatcactgatgttggagttaagcattcatcagttgatagcattccacaagaagcagatgttgtatttactcaagaaaacttagttgaaagagcaagaaaatcagctagaactgctaatataattacagttaagaacttcttagatcgttctaagtatgatgagtttattaacacattaaaataataagatactattaactagagtagattttagtgatataacttacaggcattggtaaaccgactgatttaccaatgccatttttaatttgataaatagtagagatgagggtggatgatagtcaaactttaaatttgtcattagaaatgtatcacagttttgaacttgtttgaattgaaaggatgtttcatatagagtaatatatatattgaaagaagcaataatttatagtaattaaataggaggttttattatataaaactttatttagacaaagtgacttccagcttgaactttggataaactggtagatctgatgataacgtttatgatacagagggttattaactttaaattagcagttttatttaagatgtgtgtattggatcttctttaataggaaaatctatttttaaaagaatttaaaaaattcaaaatctaatgacatctgaagattctacttcaagttaaaattaattgttatagatatgatcagtctatcaatatatacaaaataatagataaatcaggtgagatattatgaataatttaacgcctagacaacaattcatattaagtacagtattaaatgaaggaacttttaatataaaacggcttcataaagatcttgacataagtgagagaactattttaagagaactttcttctattaataaaagattaaagaagaatagtataactatatttaatgacgaaaatatgaatttaagtatttcaggtaataaagaaaatatagaagagataaagaaatcattagatatggttccgattccttggctattaagtaaagaacagagacaaatagttatcatatgtgaactattagttagtaatgagccactaaaagcttcatacttttgtcataagttcaatgttgtaatgggaagtataagccttgatatagacaacattgaagaaaggctaatatctaagaatttatgtgtgattagaaagcgtagctatgggataagtattcaaggatcagagtggaataagagaaatgcattagtggagctattctttgattttaaaccttttgaagatttaatagcatttctttatgatgaaaaggttgatccgatagttaaaactttgtttaacattgtttttgggaatgaagctatccaattagtaaaggatatattaaaagatatagattttgactatcttaaaggaaatgatgtcaaatactttagtttgtttatccaagtattgctatctataaaaaagacaaagaatggagaaattatatatttacctcaagagattaaaaatagtatattatctttagaggaatataaaaaaatacaatatttaggcagtgttctgcaaaagaataatatagatatatgtgaagatgaacttgtttacttatgtttatatttaagtgattacaagtacttttttaacaataagcatcttatagaatcagacattaattatgagaatattgctaaagaggttacagaggaaatatcaacaaagatatatgtagatattactaaagatgagcagctaataagggatttgactcagcattttaaacaaacattttatatgctgaatttaggattgaaagttataaatcctttgattaatgaaataaaggaacattattcagagttatataaaattataaaaaatacttgcagattaatattctctaggtataattttaagattcctccagaagaggttggatatataacaatgcatattgctgttgcagtacaaaagcaacaggcgatgtcaaagaatataaaagcacttgttttatgtccaagtggcataggtactgcaagaatactttgtagtaaagtaaagtcgatatttaatgaaatcaatgttattgatgtagtatccttacatgacattaatagtataattgataaaaataaatatgatttgatcctatctactgttcctgtaaacttgaaaacaaaacataacctgattgttgtttctcactttatgactgaagtggatatagagaatataagtaattttatttctaactttaaagctagtaataatgaaagagaactagaattatttgctcaaacaaaagataatacagtgacaaatcacgaatatgaattagccaatacgatggttaagaattttcagctaaaaaaatcagatagtgattcatttattaatttaataaattatatagtggatgatattcacaagattaatattggaacagataaagaagtaataagggatcttatatttaagagagaggaaaatggaaatgttgtaattccaggaactcatgtagcccttatacacacaagaagtgatacaataacttctccatttgtaggagtgtatagaataaataaacctttatctatgaagagtataggattttcaacagaagatgtagatacctttatagtaatgtttgcaagaagtactgaaagtaattatatacttaagattcttggaaaaataagcgtttcattaatagaaaagaaagaatttgttgaaatgctaagactaagtaacactatagatattagagattatttaattaatattataaataacgaggaggaagactaatggaaaaaggaattttagtaaaagaaggaatagtattaaatgttgcgtcagaatctaaggacaaggcgatagaaagagttggtaaacttttaattaatggaggatacgttaaagacaattatatagagggaatgaaagctagagaagaagaagttacaacttacatgggaaatggtgttgctattcctcatggtatgaatgaatacaagaaagaaatacttgaaacaggaatagttatagctcaatatcctaatggtgtagattttggtgaaggcaatactgcttatatagtaataggaatagcaggaaaaggcgatgaacatatggagatattatcaaagatagctttaactattcaatatgaagagaatgttgaaagacttagaaaagcaaagacaccagaagaaataatggagattatagaagaaggagaaatgtaatatgaaagcaattcaattcggtgcaggaaacataggaagaggattcataggtgcattactttcaaaagcaggatatcatgtagtatttgctgatgtaaataaagaagtaattgataaaatcaatgaagataaaaaatatacaatacatgtaatggatgtaaattgcgaagaaatagtagttgaaaacataagcggagttatttctataaacgatgaaattttagatgaaataaaagaagctgaaattataacaacagcagtaggtcttgttgtattaccaagaatagctccaacaatagctaaaggaatacaacttagaaaagaggcaggaatcaaaacaccattaaatataattgcatgtgaaaatgcaataaaagcaagttctcaattaaaagcagaagttgaaaaatgcttaagtgaagaagaaaaagcttatttagaagaatttgttggattcccagattgctctgtagatagaattgttccaccagttaagagtgaaaatattctagatgtagtagttgaaaaattctatgaatggaatgttgaagaaaaagcattcaaaggaagtattccagcaattgaaggaatgaatttagcagataatttaatggcttatatagaaagaaagctattcacattaaatactggtcatgcaattacagcatatataggaaatttaaaaggttatggaacaatagatgaaagtatagctgatgaaaaaatatataatgttgttaagaaggcaatgacagaaagtggaatgggcttagtagaaaagcataaatttgataaagaagctcacttcaaatatatagataagattattggaagattcaaaaatccttatttaaaggatgatgtatcaagagttggaagagaaccacttagaaagctaagtgatagtgatagattaataaagccactaatgactgctagaggatttgacttaagcgttgacaatttattactaggagtaggtgcagcattacactacaataatcaagaagatacacaaagtgtaaaactacaagaattaataaaggaaaagggtgtaaaaggagctatagcagaagttgctaatatagatgataatgacttactagaaaagatagaaaaggcatataatgacgttttagcaatatagaaaactcatttaaggtggatgattatccaccttaaatattttattaataatttttagtgatttaacatattaataattaattatctaaagatgattttgtaaccaaaaagtaataataaaatatatatataaatatagacaattgaaaataatatgataaaatagtcaaagaggcataaataaagaaaacagaggtgatgaatggagaagaaagaaattcttaaaatcaataaaaagcgccaggactaagtgaaatttagttgaaagtgaatttttacagggttggtttttgtaaaaggaatttagttaatagtaagctttgatataagttacgcgaatagctaatgaaatctttttaaattaaactcgactcacgttcgttcgctgagtaaattcaactacccaaatggaagatttggagtttcatttacgtcgacgaggttggggagtatcgaaacttcggcgggtgccccacggtatcgcactaccgtaaacgactggtaaaactgtgaagtgattcacaggacaaattcagtctggtgttaaaacctttattttaattttaatttctaggattactatgcccttttataattgtgctaggaataaagttaaaagaagaattaaaattaaatattatatgaaaaaagagaggaagaataaatatgtgcggaatagttggatatttaggaagtagatcagcaaaatcttttttagtagatggattatcaaagttagagtatagagggtatgattcagcaggtattgcagttgttaatgatggtaaggtaagtatcgaaaagcataaaggtcgtcttactaacttaactgataatttgggacaaggtaaagctgaaggaacacttggtatcggtcatactagatgggcaactcatggagaaccatcagatattaattcacatccacaccaaagttcaaagggagatattactgtagttcataacggaattatagaaaactatctagaacttagacaatggcttaaaggagaaggatacgaatttgtatctcaaacagatactgaagtaataccaaatttgattcactactattatgaaggagatctttttaaagcagtagttaaagctactgaaagattagaaggaagttatgccctaggtgtagtaactggagcagaaccagacaagctaattgcagtaagaaaagatagtccgctaattgttggtttaggacaagatgaaacatttattgcttcagatattccagcgataataagctatacaagagatatctatcttttagaagatagagaatttgttgttataagcaaagatggcgctaaaattttaagcgctgatggaagcgaaataaagaaagatgttttcaaagtaacttggaatgaagatgctgctgaaaagggtggatatgattcattcatgttaaaggaaatcaacgaacaaccaaaagctattagagatacaatggcatcaagattgtcaatgagccatgatatcacttttggagactttaagttatcaaaagaggatcttaataatatagatagaatatttatagtagcttgtggaactgcatataatgcaggacttatgggaagagtagcaattgaaaaattagcaagaattccagttgaagttgatatagcatcagaatttagatataaagacccattagtaactgataaatcccttgtaataacattaagccaatcaggagaaactgctgatacattagcggttcttagagattgtaagaaagcaggagctaaaactttagctataacaaatgttgtaggaagtacaatttctagagaagctgacgacgtactatatacaatggctggtccagaaatagcagtagcttctactaaagcatacacaacacaagttgttgttatgtatatgatggcaatgtatttcagtgaattaaagggattaatgactaaggaattagaaaaagaattaaaagaagcattattactagtacctgaaaaagttcaagtaattttagataaagcaagtgaagtagaagaaattgcaaatcttttaactgatgaaacagatgtattctatttaggtagaggtgctgactatgcattatctatagaagcatcattaaagcttaaagaaatttcatatattcattcagaagcatatgctggtggagaattaaaacatggaacaattgctttaatagaagaaggaactaaagtaatagcattattaactcaaaaatcattaagagaaaaaatggtaagtaatatagttgaagttaaagctagaggagcagaagtaattgcaattgcttacgaaaatgatgtattagatgaatcaattttcgataaagtaattagaattccagaacttcttaacttagtttcaccaatagttgctgtagttgcattacaacttttagcttactatacagctagaaataaaggttgcgatatagacaagccaagaaacttagctaaatcagtaacagttgaataataattgataatttaaaataatttatattgagcatgaagaaagcaggggcgatccagaatcttcatgcttcttttatttttacaattaatcatagtaatgaatatctagtgggattaagattgaagatgtttcgtctaagggaaggggggcaggaataaaagtagtaagagcagcagacaaaattaatctttattcagcattcctacatagccacttttaaaataagatctaaataaataagacattttctctgaatcaggagtgcagtttgactttaaccaccaatcaatagtaccgattaaagctttaatggtaaataggaactagatttatataaaagtgaataagtgattaaatatgttgatgatatttttgacgtatttaattagaagttggaggattgtatccactactgtggaaatgatgatgaagtttttgatgagttatctttaagagcatttaaagatggagaaaatttagtttaataaaatgtattttagaagtttaacttttgtgtctaagatattcacataacactatcatgcaggaagagaatttgccatgtagttagctgccataataatgtgattgctagctgtagtggaaaaaaaggtggttttcatatgaaaaccaccttttgggatgttatttttaaattaaaaacagtttacagcattaatctatattataagatagaagatctagatggtgactttattgtcagtatttttactaacataaagattgcgtgatgcgcctagaccggccaataagcataacccggcagcaccgattaagataataagtggcaacgtccagttgttaaccgcatcatgcagaaaaccaaaaagcatgggcccgaaagcagcgagcaagtagcctcctgattgtgccatgccggacagtcttgctgcctcatctgcatttcttgtacgagagctaaaaaatataagagctaagcaaaaagtaagcgctccgccaatacctaatataatcatccatagtgctgtaagctctgtttctccgaggaatatccccaaaagccctaccaaaacacatagggaagcagtgataactaatggacgttgattagccttacgcccagcaagtacagaaccaacaaacgatgtagggagagatactagttggtaaagggagagcatccatcctgctttgcttgaatccataccttgatgaattaaaatagctggtaaccacgcaatcatgcaatagagtagcatagactgtaatcccatatatactgtcacttgccatgctaaaggagatttccagagattgatcttattaatactatttgccttaacgatctccatttcatcttttttttcgtggacgtctttggcttttattctaatgccaccatgaaccgttctttgaacaatagatattttttgttttcttcgtttaatttgaggtatccagaggataatggataagaaactaagtgcagcccaaatgcttaaggctactccccatcctaatcctgattctgaagcgacggggacactgataccggatgctatagcgccaaaaaggcccatagaagcagtatagatgcccgtcattacaccgatccgttcagggaattcgtgttttattaagctgggaatcagcacattacctacagaaatggataatccaaggattactgtaccaagaaacagtcctaaatctccaaacaacgaacgtaatataattcccaaagtcaggaaaataagtgaccaaaaaagcactaacttagtgccaaattttcgcgccaaatttggagcgaaaggtgaaaatcctgcaaaagcgaataatggaagtgttgtaatcatacccgctaatgtatttgaaatatgtaagcttttacgaatttcatcgatcaacgggccaactgctgttaaaggtgcacgcaaattcgctgcagtaaatgtaattacgattatcagcattatttgtatagattttcttgaatatggatgtaggttttttgtgtgttcattacgtaattgattcatttatatagtttccccttaaaattatcatatgtttatacttgatttaaatatttttttaaagcaaaagtagcttcatcactgataatatgctccattttgcaggcatcttcacttgctgtttgctcattaacattgcaataggcaattaagaattgttttattagctgaaacttagctataattatttggccttgtttacgtccttcatcagtgagatggatttccccgcctaagggcttaacaactaatccggactcttgcaatatagccacagcattattaatacttggctttgaaaatcctaaataatcagcaagatcaatcgaacgtactgattgtgttttttcagataacttatatatggcttttaaatattcttcttttgaaggactaagttttttctgggaataacgcctattttgatacatcactgatcctccttgcattaattatagattaaagcgtattggtggtatacactttggtacaattcttcatttgtcttatttttttagagtccatcaaatttattgctttccaatttgttattggaaggattcgttggtggaaatatcggacattcatatggataagaaccaaagagaacgcatgaggctaaagaagtatagatagcccataaactcatttcagtagtccataaacctctttcatcagcatcaagtgttttatgttttttcttactcactttgctattatcaaaactcagaaatgactttaatgattttttctttttcatattgcatcctcctaacttaattgtgatgaaaagtgtatagtatccatactcatgcataaaattttaattgaaaaatttaattttgcttatcatgaatgagaaaaattccaattcatgtttggaggcattttgtgattcatatccaactgtatttgcaaaaatcgaatggtagttcacatagttactatgagcttcttgctttgattatagataaatggtgtatggttgccatatacttggggatcattgtttatatattcacttacatattttgcaattatcagaagtcatatctgacctctgataattttctctttttgatattagcattttctagcttaaattataatgaaaatgaatatagaagccatacacttgcgtaaagtatttattcatcaaagttttcattaaagaatttaactttgtttatcatagacgataaaaagtttgacaaaaattctaattcatattcggaagcattttgtagctcatcttcaaacatactgttcaaaatagaatgatagtacatatggttactatgagcttttttacctttttcactcaggctcaacgaatatctagataaattaagattatcaatttcctttacaaccagagcctttctctctagctttttgaggatttcggaaacagacccttttgttactcctagaatatctgctaatccaccaacatgaataccaggatgttcagcaatggcctttattatatgaatttcagagtgaaaaattggcacatcagttccaaaatagcgtgtctttttatcaagatcgattaaggcaaatgctaaatcaagagaatcatatgcaattttatgtttgttatttataaatctatccatgccaatagtatatggctaccatacacttttgtcaagtgactgttgaattaatattttatatatcgtaacgagatgatatatagtagagcaaatgctaaaagccacttttataaaaggggaaaaaatatttttaaaaataggtttacaaatttgttgaaaaataatatttcatatatatggaggaaataaaatttaaaggaaattcattaacatgaaagagaaaagatatacacattaaaaaaggcagctatgctgcatataagaacaattttattaaaaaaggcagctatgcacttataaaaagagtagctatgctacaatactaaacttttctgcacgtaaaaacattttgtggattgatttattaatatataaatatgaggggaaatggtgaatatgagagagagaaaatatgttaaatttagagttgatatgtatgaggatactaaattaaaaataatagatagaaaacctgaaagagatcttattaactatatttggacaagagttgtaatcctggctgggaaagtgaatagagaaggcgatttgtttatgtcaaaaaatattccatatacaattgaaaccttagcaatagagtttaatagggatattgaccatgttgagcttgcactaaatgtgctaatggaattagaaatgattgaagttacagaacataaggtatatagagtaaagaattttgctaaacatcaaaatattaaggtgaaggaaaaagttgaaagcaataagatatcaaattcagcagagatagaaaaagaagaagttagaaatgaagaaataaaaaatgaagaaataaaaagtgaagaagatttaaaaaatgaaagtcaaattgctataagtgaggatataagcgctggaagtaaggtgggtgagaatgatgctaaatctataaagattgatgaggcagctaacttggaaattacccataaggatattagcgggaataaagaaggcatgactaaagaaaaagactcagataatctaaaaaataacaaatctattcctatagaggttaaaaggggaaagggtaagggccgaaagaaggaaaatgcgtcaataattgaagttattgacggagatattgatagtattaatgataatgttagtggttttttccaagaggagagaccgttaggaaaagatgagcgtattattaaatcgtggacttttgattaataaatgtattttaaggttttaggttttaatcattatattaatatatttatagcataaattgcttttagaggaatttataaacgtgaaattcacatgataaatatacaaaatataatagaaatgtacaatcgcttttaatgtaaattgatataataaggctaaatcgaagatattactcatgggtataaaaataaataatttatttaaggtgggaaattatatgttagaaaaaaatttaaacgaaatcttaaagaaaaggtttaataagatagtgagagaagcgagtaatgaagaaatctatttagcattattagaattaacaaagggaacaatcaagaaaaagagtattaatagagggaagagaaagttatattatatttctgctgaatttttaattggcaaattactatcgaataacttaattaatttgggtctttatgaagatgttaaagatgttttgactaagaatggtaaggagttagctgaaattgaagaaattgaattagaaccttcgctaggaaatggtggacttggaagattagcagcttgcttcatagactctattgcaactttaggattaaatggagatggtgtaggactaaactatcactttggattatttaaacaagtttttgaagatcataagcagaaagctgttaagaatccatggataacaagtgaaagttggttaaataaatctgatattaagtttgaagttccatttgcaggattcacagtcacttcaacactttatgatatagatgtaactggctatgatcaagaagtatcaaataaacttcgtctatttgatgtagatacaatagatgaaactttagttaaagaaggaattgattttgacaaagaagatattaagaagaacttaacattattcttatatcctgatgatagtgatgaggctggacgcttattaagaatatatcaacaatattttatggttagtaatgctgcacaattaatattacttgaagcagatgagaatgggtatgatattcataaattacatgaacatgttgttgttcaaatcaatgatacgcatccatctatggttattcctgaattgataaggctgcttggagaaagaggaatacctatgtcagaagctattgaaatagtatcaaagacttgtgcttatactaatcatacaatattagcagaagctttagaaaagtggccaatagattatttgcaaaaggttgttccacacttattaccaattatcagagaattggacaatcaagttaagcttaaatttagagatgaaaaagtagctattatagatgaagatatgagagtgcatatggctcatatggatattcactatggatatagtgtaaatggtgttgcagctctccatactgatatattgaaagaagaagagctaaagccattctatgatatatatccagaaaaattcaataataaaactaatggcataactttcagaagatggttaattcattgtaataacaaacttgctagttatatttcagagcttatcggagatggatataagaaagatgctgctaagctagaagaattagcgaagttcataaatgataggatagtgttaaataagattggggaaattaaaaaagaaaataagattgcattaaaggaatatttaaaagaaacacaagggatagaaattgatgaaaattctatcttcgatattcaaatcaaaaggcttcatgagtataagagacaacaaatgaatgcactttatatcatctataagtatctagatataaagaaaggaaataagccaactactcctataacaatgatatttggggctaaggctgcgccagcttatgtaattgcacaagatataattcatgttattctttgtctgcaagaaataattaataatgatccagaagttaataaatatctaaaagttgtaatggttgaaaactataacgtgactaaggcttctaagttaatacctgcttgtgatgtttcagaacaaatctcgcttgcatctaaggaagcatcaggtactggcaacatgaagttcatgctaaatggtgcattaactttaggaaccgaagatggagctaacgtcgaaattcacgaattggttggagatgaaaatatctatatatttggtgaatcttctgaaaaagttatcgagcattataagaatgcagattatgtttctaaggaattctataaaaagccagagataaaagaattggttgactttatcataagtgatgaaatgatgaaagttggggatgaagaaaaccttacaagacttcataaagaattagttaataaggattggttcatgactttacttgatgttgaggattatataaatacaaaagatatggtatttaaagattatgaaaatagagaagcttggaataaaaaagtgttaatgaatattagcaaagcaggattcttctcttcagatcgtacgattgctcaatacaatgaagatatttggaaactataatgtataaatagaataataatttagtttaagtggcatcgataccggtttgcagcaaattaaactaataagaaagactaaaaatttgagagttcaagtttttagtcttctttttattaaagtaagtttgtttattatccgaaattattgtttctatattcagatggtgaaacgccagtaaatgatttaaatactttatggaaatgactttggtcatgaaagcccaaggttaagcctatttctaaaatgctactagtcgtagttacaagcaatactttggctctatcaattcttattttttttgcatatttcataatagtcatgcccatatgcttcttaaagcaatctgatatatagccttcagatagatttaattctctagacaatttttttaatgagatttggctttcaatattaagatgtaagtgtttcagaattctatttataacaaagttatcttttacttcaacatcatttataaggagattaatgtatgtatctatcatttgtatttcaatggtttgtaaatcttctatagtgttaagagtagggattaaagtatagaatttgttatatattgggtgaagatatcttgttaaaatgccattttcgactatttctctagtatacatagcgttccaaataagcaaatcgtttttcttatcttgtatagatatctcatcggaaatttcatctaaatgcttttttttaactatttctaagatttgtggttttgctctaagttttattagaaatgatatgtcattattaaaaatactcatatctgacatgaatgaattgtccaagataatttcctccctacattccactgatattatatatatacatattatattaaatatatacaagcgcaatcaagtactagtgagtaaggcagatgtaattaattaagacgcatgtggtaaaaaaaagtataattttcgacttgattttatgataaaaattaataatattatagtatatatgtaaagaaattgaaccctcagtgcgataataaaaagaatatgtaaattgttattgtaaaaattaagagggaaaataatgcaaatagataacagatttgattaagttaaattgttatttattcaattttatgaaaaggggtaatagtaatgaaaacgaaaaagtttagggttaacactattcgcagcaaactagttattagcttaataggaatttgtgtgattcccctaataatattaggttatggtgccaatatacaggctaaatcaatccttaatgaaaaactaaaattaacaagccagcaaacgcttttagaagtaaacgatggaattagcagctattttgatggattcagtaatatgataactatgacatctacagattataactttgttaacagtgataagagtgagcaagcagcatacataccagaaagtctaaagaatttaaaagaaagtaatagtaatattttcagttcatattttgcaactactgatgggaagtttgatatatatcctaacagtaaaatgccagaaggatttaatcccaaagaaaggccttggtacaaacaagctgtagataataaaggaaaagtaataataacgttaccgtttactgatgctcagacaggaaaaaatgttgtgtctattgcaaagacagtagaaagagatggaaaagtcataggagtttgcgctatgaatgtttctttagagacacttacagaaaaaataagtacgaagaaaataggaagaactggatatgtttttatttctgatgtagaaggtaaaaatatgatagcacatccaaataaagatttattaggaactgatgcagcatctaaacaatctttttggaatgatgctaaaactaatgaaaaaggatttataacgtatacttttaataatgcaaataagtttggagtatatgaaactaataatattacaggttggaaattagtagcgacgttagatgaaaaagaattatcaaatgatacaaattcaatacgaactacaactttaattatagtagtagttatatgtttgatttcaatagtcttatctttattattaagtaaaggaatagcacataatattaagaaattaaaagaagtatttgaaaaagcctcaaggggagatttaactgtgtctatgacttcgtctacaaaagatgaatttatggatttagctaattcctttaatgaaatgctaaagaatatttcagagcttatgaataatgtaactaaatcatcaaaaacagttttggaaacgtcatcgaatcttgcaagtatgtctgaggaagtaacagcatctataggagaggttgcaaaagcaatagaagaggtatcagaaggagcaacaaatcaatcgcaaaatgctcaaaacggagtttcagaaatgaatgatttatctaatagattagataaaataagtgtaaattctaatgagatggataaactctcagcaagtaccaaagaattaggtgctaaaggattatctatgatagatacactaatagagaaatcgaagaaaactaagatagctacaggtgaagttgatagtatagttaaggatatggatgaaagtactagaaagataaatactatatctgaaacaatttcgcaaataacagagcaaactaatttattggcattaaacgcaagtatagaatctgcacgtgcaggggaggccggaaaaggttttgcagttgtagcagaagaaataagaaaactcgcggaacaatcaaaatcatcaacagaagaaatcaaagttattattacaaatatccagagtaagtctgatacagcggttaaagcaattaaatctacagaaagtgtagtgacagagcaagatttagcagtaggaaagacacaggagatatttagcgaaatccttagatcaattgaaacaatgataagcaaggttgatgagataaagacttctattattgatgttgatgagaaaaagaaaaaagcggtattagaaattgagaatatatcgctaatatcacaggaaactgcttcagcttcagaagaagtaactgcatcaacagaggaaataacagcagtcatggatagattcacaaaatatgcggatgagctgcaattattggcggaaaagttagatgaagaaataagtaagtttaaaatgacataggtagaattacaagttgaattggatgtaagaagctaattcaacttgttctttatttataggaataataatgaatgaaagttaaaagtatcctagataatttgattatttagtggtatcattatatagagaattggtatattggaggtatgattatgaagagtttaaaaggaagcaaaacagcagtaaatttaatgaaatcatttgcgggggaaagtcaagctagaactaggtatacttactattctagtattgctaaaaaagaagggtttgtgcaaattgcgaacatattcttagaaacagcagaacaagaaaaagaacatgcaaaaaggttttataaatttcttaaggatgattatgttgacgagcagatagaaatacaagcatcttacccagtctcattccacgaaagtacattgaaaaacttacttgcagcagcttcaggcgaaaatgaagaatggacagacctttatccaagttttgcaaaaacagctgaagaggaaggatatccagaaattgcagtagtttatagaaagataagtgaagttgaagcacgacatgaggctagatataaaaaactagccaaaaatattgaagatggaacagtatttaagaaggatgaagtaactctttggaagtgtggcaattgcggatttatatatgaaggcaaagaagcaccagctgcatgtcctgcatgtgcacatccacaagcatactttgaagtatttgttgaaaattattaatatagaaatcaaatagacatacattaagggaacacttatatttaagtttaaattaagtgtttccttttttgcgttggtatttttgaaaatttagacagttcatatttgccgtgttaaaataaaagaagtatataaaaataagacagatggtgagtatatgattaaagctaaattagaaaagaataaaagtggaaaaataatatttaaattaaaaatagatagcgattataaagaaaatattttatttaaaagagctattatggaatcaaaagaaattaagggacgatatcaatatgaagtacctctaagattctttattccaatatgtaagaatgtaggcagagagaatttagtattagataagagatgcatattatcttatttggaattctcagattactatgatgaaaattattatacagatatagatgctaccgcaaagtatatgaaaaaatggagagaagaaggttgtcctgacatttatagaataactatagataaagatagttatgaaataacaaaggaggtagtctttaagaagcctaaggtagtaattaaggactttaatttataatatgtattttaaaagagaaataaaaaaggagttatctcaaattagaagtaatttgagatgaagcctttttaatgaattttagtattatttactataaattacgcttgctattatattagtaatttctaatgaattgctagagagtaaaaattcatgtatagaacttaggtttaaggatttaagtaatagcaaatcattagtattagctttgaaaattttattgttaatagtaaatttaaagctaccacttacaacataaaaacaaatggctataagttccttatctaatggaacttgatatttgaatacacacttttttctaggcgtaatatttaaatgaactaattcaccattataattctctcttgtcattaagttaaaaacagaggcttttccataagtttttgttttccagtcacccatgaagctatcttgttcaaaggtttttagtaatttcctatatttattttcatgatcaagggttattttgccttcagtaaccataaatttacgtgaaacatttgtaagattgctaaaagtagattccggtatatcaattttagctataccaagtctccataagaagttcctgcttgcataatcagaatctactggatatgttattaattctgtcgccattccaccagaccaaaatgtcggcttatagctcttttctcttattaattcaacatcgtagttcataaattactctccctttatttatcacatattttatgttcattatattaaaagatatatgtataatcaataaagataagtacaatataaagcataattaattttactactatgtaaggtttactatttttagatatatatgttgcaattcacagtgcacatttcacaattcacaattacagctaaaattattgcaatatttttataattatgatgaagaattgcttttgcaatatatatatataaagaatagacataagatgttttagtaagtaaaattaaaataataagtaaagtgaatagttagatcaaatatctatagagttattaatttgagaacaatgcgaagttcatgattaatgtgaagtataattataggagttgttgttatggaaagctttattaataagaaaatactaagaaaagaaattttagataagcgaaaaaaaatagatgtaacagaaaaagaaaaaatggatgaaagaatattaaaaacagtttatagtagcgagtactataaattggcaaaaaatatttttgtttatatatcctttgacactgaaataaatacaagagattttataaaggaatctttaaataatgataaaagaatttatgttccaaggacggaaattaaaactaaacttatggatgcagtagaaattaaatcactggataatttgttggagagttcatatggaataccagaaccatctatagatgatccctatattgatccaaacgaacttgatttaattatagttccaggcgtagcttttgacaggcgtggggggagagttggctatggagcaggtttttatgatagatatttcaagaaaattagcaaagataatataaaaagaattaccaaattagcattagcatatgattttcaagtacttgataaagttccaaccagttatcatgacgtaccagtagattacattataactgaaaaagaatttataaagttggaataatgtaatgtcagattaaaataaacagggggaatatatggaatacattgaaagtaattttggttacctaaaaggaacccaaatagaaaagtactacgatcatctgataaaagcagaatttttatgcgagtattatccgatagttacaaagattattgttagaaaagtaatagaaatgcttttaagggatatagcgcaggacagtggagtggatatgaatgtttctgcacttacattattaaatagtattaagttaaagtctaatatttctttttcagaagaaatttataatagtatagaaattatattggctaacggatatgagaacatttcaaaaagagatagaaatagaaagatacctaaacatccaatagaaattttaaaaatagctcaaaaggttctatattactatttgaaagaaaaagaaaatttgatgctagatataaagaatttaagttttagtgctcctagtactatagaatatatgaggaaagaacttttaaagatcaataacgatattgctcaaagagaaaatttaatcaataatcttaggaaaaagattcttgaggtagatagttcttcaaaacgaataggtgaaataaataacatcataatattaataaaagaagaaaaagcttatttagaagaaatccaagatatattaaatagaaaagtagaaatgcaaaataaatgtgtattgaatatggaaacggattataaaacatatgaaaaaaagcttaatgaaatgaaaattaagtttaatgaaaatgaaggacttcttcttgaaaaagagggacagcttctgaaggctgagatacaaaatcaagaattgaaaatatcgactgaggagttagatgacgaagatgaatcaataaaaagaatgaaagtatcactggatgaagaattaagaacattaagacaggcatatgaaagtttattaaacttaacagaagaatataaggatattgttaaaacaatagaattttcatatgataatgaattaaaaaaagaattggaagctaaaaagaacagtatccaaataaaaataaattttgaggatgctgtatttaacgagaatataattatttacaataaaaatatagtggagtatagaagaaaagcgttaatatttaaagaactagtaaatgaaaatataaaacgagaaattaggcatgaaaaattttatgatggatttttaagactatcgggaaaagatcttaaaatcgtatatacaatcattaataatattacttcaagttttaatttgataagtaaacctaaagaattattgggtagatataatgaagataagtttttggaattgctaaatagaaatttagagaacctaaaaaacattaatgataatgaaataaagctgattttatattataaattaataagtttgtcaaatgctccttatgggaagatatataatagaagaaagtttgtacagacattggattacatggtagagaaggcttatgctgttttagtgcccaaaaaggattttaaagcaagagcaataaaattagatgcaataaatgaatattatatgaataagactatatcagcattaaaaaataaaggttcaaatacacatattacagaagagcttatagaaaagatttatgatatggttataaaattaaaacagagaccagaaaataaagagaaaagattttactacgaaaaacttgatttggatgttatgacggagtcgactattaaagcagctataaaatcgcagccatatacatttctacatatgatagcgggcttagcgagcattgattcatataaggatatgtctagtattatatttcaaattgaaaatttaattgagaaaaggtctttaattaaaaatttttctaatacctattttatggttctcttatatttatctagtgatgcaatagttgtaagccaaaaccagcaagaagaattattgccattagcaattatgttaataacgagtgtaagtttagtctcagataatgattttataaatctggaaggttataatgacttggttaagttgtggaaacaaaaacaacaaaaatataacgatatctttatgaagaaagaggaagaggaaagtagcttaggcctaataatgagagaaaaattagaattagaaattaatcagagagaattatcagaagcatatgacacattagtgggaaggtatggaagctacgagaatgaattcaaaaatctggttatgaattcagaaaaaagagttctattgccatcatatttttattatgatgatttatgcaataaaaagaagctagcagaaaagcacatcaatgaatcaaaaaataaaataggaacattgaaaagtatgttttctatagagatttggaaggatcaagcaaataaatttattaatgaatcaaatatgctagaagctgaaaagttgctaattaaagaagcaaagcaaaagccttactttaaaaaagaatattcagttttcttagaattagaagatcaaattcaaaaagtaaatgaatctatacaaaaaaataaggagatgctgaaaagcaaagatgcactagttgataatataggaagtaaaattattgacttgcagaagcagttaacgactatgaagaatgtgtatatagacatagaaagtggttactaaaagattaattgcagatatattattatgatttattaagtgttatattattttacagaaagagcatgagtctagggtcagcaaaaaaaaatgtgtaaattaaaaaaaatgaggacgccttatttacaagggcatcctcattttttttataaattttatagttctttattttctatttctttaacgattctctcgataaacgcatctaatttaacagcgccttcatcgtcattctttctgcttcttacagatacttcattattagcagcttctttttctccaacaactaaaatgtaaggagttctttcaagtctagcttctctaatcttataaccaattttttcagctctataatcagtttcaactctaatacctttattctttaaggcttttgtaactgcttcagcataatcattgtacttatcagagattggtaatactttggcttgaactggagataaccatgttgggaaagcaccagcatattcttctataagcatagctaaagttctttcataacatccaattgatgatctatggattatataaggacgtttcttttctccgtctttatctacataactcatatcaaatctttcagctaaagcaaagtcaatttgaactgtgaataaagtatcttctttaccatgaacatttctaaattgtaaatcaagctttggaccatagaaagcagcttcatcatcagcttcaacataattaatatttaagtgatctaggatatttctcattgtatcttgagttttattccaagcatcaggatcattgatatatttttcagtattatttggatcccatttagagaatctataagttattttttcagcaattcctaaggttcccattaaatattgaattaattcaagaacgcccttaaattcttcttctaattgttcaggtgtaacaatcaaatgaccatcagccaaagtgaattgtctaactcttataagaccatgcatttcacctgaagcttcatttctaaataaagtagaagtttcgccgtatcttattggaagatctctatagctgtgttgctcagcattataaattgtatattggaatgggcaagtcattggtcttaaagcaaatacttcatcgtccttttcttcatcacctaatacaaacataccgtctttatagtgatcccagtgaccagaaatcttatacaaatcgcttttagccataagtggagtcttagttaaaagatagcctcttttttcttcctcatcttcaacccatctttgaagaagttgaactatttttgctcctttaggcattaataatggaagcccttgacctacattttcatcagttgtaaacaactttaactctctaccaagcttattgtgatctctctttttagcttcttctaaagcttctaggaaagcatctaagtctgctttctttaagaatgcagtaccatagattcttgtaagcatcttatttttttcattacccttccagtaagcaccagcacttctagtaagtttaattgctttaactgattttattgacataagatgaggaccagcacataagtctgtgaaatcacccattttatagaatgagattatttcattttcaggaagatcgtttattaattcaactttgtaaggttcatccttcattaattctaaagcttcatttcttggaagctcaaatctagatatttctggattttccttaattattttttgcatttctgcttcaagtttttctaagtctgcagcagtgaatgcactttctctatcgaaatcatagtagaagccagttgcaattgaaggtcctatagctaactttgtttcagggaataatctttttacggcataagctaaaacgtgagatatgctatgtcttagggcatctttaccttcttgagagtcaaatgtgcatatgcttaactcaacatcttcatttatttcttttctaaggtcttcaacctttccattaactataccgcagcaagcatttctagctaaaccttcgctaattgatttggcaatttcataaatagataaaccagcttcaaattctttaattgatccatcttttaaagttacttttatcattttaaaactcctttcaaatttaaaaaaaatgtgattctgtggcttgttaaattttaataataatatcgttaagaaaatttattactaaaatcatacatttttgcaaacaaaaaaacctcatctctaaaaatagagacgaagtaatatccgtggttccactctaattacctagaacagactgattaaaataggtcaaataaaataaacattaaaaacctttttaaaaatcagttaaataggtcgcttaaatttatcgtaacgtgataattacgggctttattagggccactcagaggtggttttcagtctaaatttatataagaataatcgcaccaacatattctctctctgaaaaataagattttagcttactgtcctcatcaacgtgtttatttattatattaatattcttaattataagcacatgatttttagatgtcaactaattaacaaaaaaaatacaaaagatattaagaatctcagaatatattggatattttaacaaaattataataaggctttaacctggaatttattaaaatcaaataaaatttatgtatattaggttgtatttagtatttttttcaggaggtaaagatgaatagaagtattaaaagtataaaggttaaaattattatgttcctaataccaatgttattaattgcatttatagctttgtcgggaataggatatagatttgcaagtaagtcattaaaagagagtaacttaaatgtaatggaagaaatgacgaaaactgctgcatcacgagcagatgatcaaataaaaagtgagattaggaaccttgaagtaattgcaagtaatccaataataacggataagaatgtacaaatagaagaaaaaattcaaatacttaaaccagcattgaaaacagttggacaattagaaatgagcataagtgataaagatggaaattcaatagatactttaggaaataagaaatcaataaagacaacacaaagtttcatgaaatcaataaatggtgaaaattcaataaccaatccatatatagatccaatcacaaagaaaaaagtcatatcatattcagtacctatcaaggattcttcaaatagtattataggaattattacctcgataaaagattgtaaagattttgcttctttaaacaaagaaactaattttttgaaaacgggaaatttattaattgtagatagtaatggtaattttatagtttcagaagatgagagcttggtaaatgagaataaaaatataaccaatatgacatctgataaagaaaatttacaagatctaaataacataggaaaaagtatgacaattgggactcaatctggaacaggaaaatatacttatgagggtaaagaaagatatatatcatatagccccatagggaaaacaggtcttgccataggaatcacagtagaagaaaaagatttgctaagtgcattaaacagtctagctttcattgatattatagtaactgttattatgactctactaatattaactattataataggctttacaattatagttgtaaacaggttgcttggggcaaaatattacgtagatagtattgctaaaggtgatttttatactaaagttgatgataaatatactaaaggtaatgatgaaataagcgaaatatgcctaagtgtaagccaagctaaagaatcagtaggaaagatgatagaggcagtaagagaggattcaaatatagttagagaaggttccgtatcattaaatcaaatttcagaagaactatcaattcttacagaggaaatatcagcatccataggagaggtttctaataacactaataaacaaagtcatgactttgtacaaataagcactaagcttgaaaactttggtgaaaatataactgaagttaagaataatgttcattcaattaatgaagatattgcaataataaatgataaatctttaaaaggaactaaagacatagaagaattaaatggcggaattataagtgttaatgatagtttcgaaaagtttttaattagcatagagtatatacaaggtgatatgaaaaatgttaatgggatcacgaatattataaatggaatatctgaacaaataaatcttctagcacttaatgcagctattgaagcagctagcgcaggcgatgcaggacgagggtttagcgtaatagcattggaagtgaaaaagctttcagacaaaagtaaggagtctgcacagaatatttataagataataaatagacttataaatataataaacaaacttgtagaagagtctaaaaatatggagagtgagttgcatgagcagaaggaaatgatttataatgcatcaagttcattttcagaaatagcactgctagttaaagaaatagcgcctaaagtatctaatatagatagtgtatttaataatattaatcacagtaaagatttaatagttgaaactgtatatgagttatcaggagaaataacagagacatcgaattccttggagcaagtaacgaattcttcagtgcagcttgcacgccttgcagagaaagtcaacagcagttctgatattttactagatagagcagatgatttgctgcaaaaagttaatcaatttaaaatcaaagaagaggatttaacaaaagataccgacatatctgtagaaaattcaaaagcaaataatcaatatgaagaaaaatcatattccagtgggagcggagagttagacactaagaataagagtttagaaaaaacgaatttattaaataagtttgaagactcaagagatagtgatcaatatgaaagaaatctagatcttgatttggaaaaggaattaaaggaattatcaatattaccggaggaagaaattaatttggaatttagtaattatgggacaagtgatctggatttatcactggcagaacactttgttgatttaagtgtatctccgctagaaaagttggaagtagatacatcaactaaagattttggatggggatgttcgaagataacagaaattaaagaatatattaagcaaaaagatgagggagaatgcacggaggatgatttaggaagatataatatatcatagttttttatataaatatatctaaaaaatcataataaatgtataaaatttaatattgatttaatatattgaatagatgtataatattggtaggcagatgtggcggaattggcagacgcactagacttaggatctagcgccttttggtgtaagggttcgactcccttcatctgcaccaataagcgggaatgactcaatggtagagtgtcaccttcccaaggtggacgttgcgggttcgagccccgttttccgctccagtaagaatataaagattaaattaaaataacaaatatctaaaacaaaaatttgttttagatatttgttattttaatttacacatggttactaagataaatttaattatataacacaataagttaataattgtcttcaattaatttgtctaaagttaagttaacaatcatttcttcagagtaaaatttttcacccattattttaaatattacttctgattttttataaccttctttataaagctttaagtttcttgtaattcttttaagagtgtttcttggtatatttaattctaatgctagctccttaaaagaataataatctttttttagcatatcatataatttattttgaagatctaacttatatctataatcaacttctttggattggtggggaccatattttcctctatgatgggaaggacataaatatttataatttagttctatatcaaagccaccttcacttctgtgaacaatatgatgtatatcagcttcggcattacatatttcacataaagacaatttttaatcctccttagaatctaccctatataaaaatatattaattattaaaatttatttaaattaaaaaaataatagaattcttaatataataatatgataactgtaaataacttgacatttaatattataaagtaataaataagaaatatcaatttgaatatctataataaaagtctaaaattttgtaataaaataataaaatggggataatatattaatatgtatatattaaacaaatttatccaagaataaacaattgtgagataaatgagttataatataattagaaaacaaaagataactattaataatatattttataaaatattagttgggaaggtgagtaaagtgtgggaagtttataattcatttaattattgggaaaacgttatcagcaagaataagacaataagaggacatatgtttatgcagaaaccaccaacagaaagaagtatttattttcatacccttatattcggaaacaataatggtataaacaatatatggggatatttccctaatagaaagtgtttgattgggtatcttcagtattcgttcttgcaggaagctttttataagtggatatatggaaaagaaaagttaattactaggattccacatttaactgttgataagatcattcgtgagggagaaaaactaaagaaaatagacaaagaagttgcaagtaatatgaggagagactacgattttttaagtagtttatggcatcttccatctgaaaaggctcaagctagattagataaattcccagcagagtttaacaagaagtggatgggaaataacacagaatttttatatataaaaattttcaatactccagaggagcttggagaatttgtaatttcctcttcgttattaacaaatacaaaagaagaattagaaaatagaataggtatgtctattaatgagtgggaagatatttgtaagaatgcaataagtgatcctaataaaggggaagtattcagagagattctactaaagaaattaagtgaagtattttagcaagttaatatataatttaaggagatataattagcagattccaatctgctaattatatctcccttttaattataaagtactataaactttgaatagtatatttctaaattatactttcaacagaagaaatgctttgagaagaaattccaagcatttcgccagtaaaaccaaggccttcttcagtagtagccttaatatttattttattaatatctatattcagcgcaattgaaatgttctttctcatattctcaatatgaggcagcatttttggtttttgagctattattgtagcgtctatgttgtttatggcatagccggacttaagaagcaatttacctgtttcttcaagaagtatgatactagatatgccactaaatctactatctgtatcagggaaatgtttgcctatatcgccaagagcacaagcgcccaataaagagtctattatagcgtggataagaacatctgcatcggaatgacctagcagccccttctcatatggaatttctactcctcctaaaattaattttctgttttcaactaatctatgaacatcgtatcctagtccaattctcatataatcaccttgtataatgaacatgtagtaaaaattcattatacttttcctttcttaataatttttaatatacttaacataagacgctgtggattagttttttcacctatagctagactatttcaattgaggatataaccacagctttatgcttatttgttaattagttagataacgcatgacgttttatatagagcaaggatacatttagcatgaagctacgtggagcatagcggactaaattaaaaaaggagttgttcttatgatttatattggcattgatgtagctaaagctaaacacgattgctgcattattgattcagatggtgttattattaatgattctttacgtatatccaattcacgtgaaggttttgaattactttattcttcaatactttccgtcctacctaacaaggatatttctaacgtaaaaataggacttgaatcaacaggtcattatagcactaatctccaaaactatttgtatgctaaaggctttcacctatccattctcaatcctttagctacaaatcttttccgtaaggctcaaacccttaggaaaactaaaaccgataaaacggatgcactagttattgctaaaatgcttttctctgatgatacaaaatcctattcacctgtatcatatcaaattcaagagctaaagtcactaactagacatagatatcgcttaattggttatagatctaggcttaaactatcaattactagacttatagatataatttttcccgaattaccaaagtatgtttggtctattcatcaagtctctgtttatgctctcctatcggagttaccgagcccgaaggaaatatccaattgtcatttaactaaattgacaaaccttctggctaaatccactaaaggcaaatatagtagagcaaaagctattgaaataaaggaagtagctagcaattctatcggaactagcacacgttctttatcttttgaacttcagcaaattattaggttaattcgatctgttcaagctgaaattgatgctttagataagcaaataaaggatgttgttatagaaatagactctcctttaatgagtattcctggaatctcttatacactagcctcaataattctagctgaaattggagatatagatagattcactgatccagcaaagcttttagctttttcaggacttgatccatcaacatatcaatccggaaaatataatgctacacatacacctatggttaaacgtggttctacctacttacgttgggctatattaacagcatctagaactgtttctatgcgtgattccacttttggggattatcttgcaaagaagcaaagtgaaggcaagcattactatattgctatgagccatgtagcaaaaaaactaatacgtgttattttttatcttttaaaaaccaatacttcatttgtttcacaaatttaattccttaattttccaagcaatgtgattgctttatttgtcatgcacttttttattgactaaaaaatataatttttttattaacttatattgacttcatatagttagtctcatatgtgttttgttattttactattttaacatattatgaagctttttatataaataattatactaatttaaaatacgtctacgtttatttgtggacatgttgttcaaagaacttgttttgggtctaatataaaatttaatattaaaccaagaaataaatctatttatatgaaaatgtataaaggttattctacgtctttttacaaaatctacatatataatttttcctctcattaataatctcccaaatattgcttttaaattaaatttagataaagaaaattttatagataaatagctttatatgctataatatcatagtatgaagaacttatacaaagggttaatattttaaagaggtgttaattttatggaaaacttgggctttagtaaagacaaatatgtattttcatccatgccgtcaatgttcttaataggagatactgcggaggatattagaaaaaaacagatatctttatttataaatgaattaagctcatataatgttttacttaaagatttagtaaactttccgattaaagaagctgacagaaatatagctttaaatatagcttattatatagctagtgatgaggatttactaagaataatcaatgaaaaaagagctttacctatagctaaaataagtaagttaactaggataaaatctgagattataaataaatttagggactacataatagcttattgtattataataactaattcaaattataaatttattcaggattatctaagaataaaattaaaagaagataatcaagttgtaagcatttcaagtaaaaatcagcaactatataaaggaatagtaataaaagcttttaaaaattctgcatatatattaacttcaaaaggagaatttttaaagataaagacttctaatagatcaaaggttggagatgtatgtgaaggaaaagaaaagaaaggtattaggggatacaaaatacatatatcaatattactatttatattaatattgattggtagtggtataactattgaatataggacaacacagagcataatagttatagaaacaacttctaatataaagattcatattaataagtttaacaaagttatatatgcctattcacctacagacaaaggaaaagagcttgttggaaatattgatgttttgaataaagatgttgatgaggctatatcggagatatttgaatacgcattggataatgaaatgttagatttaagtaggaaaacattaataacaattaatggacaagcattaaaatatggagagctaactaaaacaaataaatttatatacgaacataatatacctatagctataaataatgcaggaaatcaacaaaaattacctaaatactcaactgaagatagcaaggaagaaaaaaaataactctttatttaagagttattttttagtttgtgctaaaacttccttaaaagtattcatatcatattttgagctaatataaattctatcaagtttaagaatattatcatctctatctgagagtcctctcctagtagtaaatgctaacgtataacctgaatttttagctgctataacactatcatcattaaaatctccaaatggataggcaacagcttcaactttttttcctgttattgattccaaagtttcttttgattccttcaattcacttaattgtttatcatatggaagctgattaagtttgggatgactaacagtatgactttctatatctattccgtaatcagacatttcttttatagcctcttttgataaataataggaaccatctagatctgatgttatacaaaatattgttgctaccatatttagatttttcaaaattggaaaagcgttgtagtaattatccatatagccatcatcaaaagtaataactatgctcttctcaggaattggggaattgtttaataagtagttttttagttcatctaaagttaatgttatataaccttgattttttatgtactcaagctgcattcgaagattttctggagttattgtaacctcattttcagctggttctctcacggaatggtaatataatacaggaactcctctattgtcagtaattaagtttgaattattaaaagatctttcgttttgaattgtgttttgttctatgttggaaggatctttctctaattcattttcagatccaacatgattttcatcaatacttgtgttatcagaaccatgattagaagctatagagtttttataagatatattgtgtgttattaggtaaatagaaaacattacaaacaataagctgaataccaaaatacttaaggaagttttgtttttgaaaagccttttgtaagaaatgttccttggtggtaaagttccttttaacatgttgttattattcacctccttgtaattaaaacaaatataatttcttttataattataccctaaacttaaagaaaaactacaagacctgatataaatcatttgtgatatatattctaattaaaattctaaatctcagccttaattgagcccttagattatcagggggtaaatgtaaatttattattgaaagatattatataaaaaatttatttttatagagtttgagcggaataacttattgaaaaaagtagcataatataaaaatagtacaacttactaacattatccacattggcttgtggataaaatgttataaagctgttaacatacataattttacatgttggttttgtggatataaaatatattatgtcgcaaaatgcataaatcagggaggcgctaaaatgggtattatagctaatataacagggctattaatagtaagttcaatgttatccactgcttgtccacaggaaatgtttataactaataaaatacaaagtgaaagtaaatttaaaattgtggataaatctataactaaaaatctaaattacttaaaattagacataaatatgcctcaattagtaggtggaaatgatgaaaaaagaataaatttgataaataatgcaattagtcaagatattttgccaagaggtgaggagtctgaaaaaacagcgaaagaatacttcggagaaaagggacaagaaaccccaagatttccatatgaaatttattcaagatacacaacatcagaagataataatcaaattcttagcttatataatgactattatgagtttcttggaggagctcatggtatgacaacaaggacttcatatacaatagataagaagaaagaagcgctgctaactttaaaggaattattcagtgaaggatataattattctgacataataaataaagaaatagaaaatcaaataaagaaaaatccagaaaattattttgattcaggtaatgtatttaaggggattaatgaaaatcaaagtttttatataagagacggggacctagtaatatattaccagttatatgatatagcgccatatgtatttggaattcctgaatttaaaattcccttaaaactatttgataaggattttatttattataaaaattgggattcaggaagcaagaagtagatactaatttttattagacaggtcattaaatcgcaagctgattgacatcttaagattaactttaacttatagaattaaaatagatagtaataaattatagaacaaatttaaataaaagacatgtatatagaaatcaaatcatagaaattcataaaaatataccatataggattatattatctatcctgtatggtatattttacttaatactatgatttaacttattgttactaatattttttaattattataggcactagtgttttgatttcccctaaatccatagccatctgatattattctgcctattccagttactttaccagttatgcatcctctgcagtgtgcaggtgtatcgcctgtacatattttacctggatataatgcataaagctttctatattcaccttcagtaacgttaggcattacaacattagcaccgctttgaagtgcaactattcttccgtttggagttaaagattccattgcagttgttgcaggaatatttatatcaggaagtattaatctagttaaagccataacctttaatgctagagtaagatttccaccttgagcatcctttaaaggtgtatcttcatttggtataaatggacctataccaatcatatctgcattaatttctttaaagaaaagtatatcactagctatagattctaatgtttgatttggtagaccaacaagaataccacttccaacttcatatcctaagtctcttaaattttttaaacaattcaatctttcctcgaagctcatgttaggatccatatcttcataaagctttttatcagtagtctcaattcttattaaatatctatcagcgccagcttctttaaatgccttatattcctcataagttttttcacctaagcttaaggttaaagcgacatttaatttttttatttcttttactatgtttgtcattctttctttagtaaaataatcatcttctccaccttgaagcacaagtgttttgtagccatagctaacagcctttttagcaaagtctagaatctcttcctcagttaatctatatctttcaatatttttattgtctctacgtaaaccacaataaaggcaatttcttttgcagatatttgtaaattctataagccctcttaaatgaacataatcccctaagtatttttgacgtacttcatcagcagctttaaatagttcttcatttatatcatcattttgtagtaattcaagtatttcatctttatttaagtcatgtgtaattttagccttttcaataattttattcatagttcctcctaagttaaaagaaattaatagctaactgatattagtatactatacaatctaacaacataacaacatagtagtttgtgtaaaatatgacattcacattgaaatatatgttttgaatatatcccttgacatcaggtatacaaataaattaatataaatacatagaattagttaaatgaattgaactattttaggagatgaatattttgattgaaaaacactttgaatatatagcaaattatttatggcagcagtccataaataatattaatttaattttatcaaccgaagaaaagaagatgtttaacataacggactattattatttgacaacaatatataatatggaaaatccaaatttaggagagatagcggaaaaattaaaactgactaaaccagcaatatctgcattggctaagaggttagtaaaaaatgaactagttgaaaaagtaaaatcagaagaagatggaagaatttattatttaaaagttacggagaaaggcataaagataatagaaggtgataataaaatctataagcaattcgctaatttaataagtgaaattacgtcggaggagaaattagaggagttaagtcttctttttagtaaggttgttaaagtattaaaaagtaaagaataatagaaaaaacaaatttttttagaaatttagttagatgaatttaattaaattgtttgaattaatattcaagaaaattaagatctgaatttagaatcttatatcaaaataggagaagtgaaaatgaaaatattaaagcagttttttttagtcacagatattggttttatagtttactggtttattaccttattccatctgattccagagagcttgctatttaaagattacgaaaatcctattttagtatcatggaattggtcattcttaccccttgatttattaatttcattaacaggatttattagtttgtatatgtattacactacaaatgaattatggaaaaaatttagtctgatttcgcttgtattaactttttgttcaggacttcaagccatttctttctggactatgagatatgatttcgatttattgtggtggatttctaatttgtatttaatgatatatccattattctttataaaaagtttattaacggatgctattgagtgaggtgtattatgataagttggatttatttaatttttgccataatatttgaagtttcaggaactatatcaatgaagttatcagagggttttacaaatataaaatatgcaattgttatgctaggtttttatgtattaagtttaagtatgttaacattagctttaaagaaagtaccaattggagttgcatacgcaacctggtcaggcgttgggataatattgctgtcagttatagggattatattttttaaggaaccgattaatctgcagaagatagtttttataggacttataataataggagtcataggattaaatttaacatctacaatacattaatatcaatatataaagaagctttgttagagacatgtagaataggaaaaagaataatctattctatcatgtctattgttttacgatttttagaaaataacagcatgatatgtactttgttcttattgcaaatgaatatataatttatatttttattagataccttagcaattattttgatatgggataaattaaatattattttcaggataaactatacacagtttgtttatagtaagtacaactactatacaaaagtaacttgagtataaaaatttagaagataattttggaggtagaaaatgagagttacaaatccagaagaattgacaaaaagaatagagcaaataagagaagctcaaagagaatttgcaaaattttctcaagaggaggtagatgaaatatttaggcaggcagctatggctgctaatgatgcaagaattactcttgctaaaatggcagtagaagaaagcggcatgggaatagtagaagataaggtaataaagaatcacttcgcagctgagtacatatacaatcaatataaagatacaaagacttgtggagttatagaaagagatgaaatgttcggaataactcatatcgctgaacctataggggtaatagctgcaatcgtgccaacaacaaacccaacatcaacagctatatttaaaacattgattgcattaaagacaaggaacggaataattataagtccacaccctagggcaaagaattcaacaatagcagcagcaaaaatagttctagaggcagcagaaagagctggtgcaccaaaaggaataattggatggatagatgaaccatcaatagaaatgtccagaaatgttatggcagaatctgatattatattagccactggcggtccaggaatggttagagctgcttattcatcaggaaaaccagctattggagttggagcaggaaatactccagctataattgatgatacagcacatataaagatggctgtaaactcaattttactttctaaaacttttgataatggggtagtttgcgcatcagaacaaagtattatagctatggaatcagtatatgatgaagttagaaaagaactagatgaaagaggggcttatatacttaaaggtgatgaggtagataaggttagaagtataatattagattcaaaaggatctttaaattcagagattgttgggcaatcagcttacaagattgcaaagatggctggggttgaagtatctgaagctgttaaagtattaataggtgaagttgaatcacctgaattagaagaaccattttcacatgaaaaattgtcaccaatattaggcatgtataaagctaaaactttcgatgatgcactaagattggcttcaagaatgatagaattaggtggatttggtcatacatcaatactttatacaaatcaagtagaatcaatagatagaatagagaagttcggagtagccatgaagactgctagaactttaataaatatgcctgcatctcaaggtgcaatcggagatatatataactttaaattagcaccatcattgactcttggctgtggatcttggggtggaaattcaatatcggaaaatgtaggccctaagcatctaattaatgttaaaagaattgctgagaggagagaaaatatgctttggttcagagttccagacaaaatctactttaaatttggatgtcttccaatcgctttagaagaattaaaggcaatgaagaagaaaagggcattcatagtaacagatagagtattatttgatttaggttatactcataagattacagatattttaagtgaaaatcatatagaatacaagatattctcagatgtagaacctgatccaacattaaaggctgcaaagttaggtgcagatgctatgagagactttaatccagatgttattatagctataggtggaggatcacctatggatgctgctaaaattatgtgggtaatgtatgagcatccagatgttagatttgaagatttagcaatgagatttatggatattagaaagagagtatatgaattccctccaatgggagaaaaggcaattttagttgcaattccaacatcagcaggaactggatcagaagtaactccatttgcagttataacagatcaacaaacaggagttaagtatccacttgcagattacgcgttaactcctaatatggctataatagatgcagaacttatgatgagcatgcctaaaggattaacagcagcctctggcatagatgctttagttcatgcaattgaggcctatgtttcagtgctagcatctgagtatacaaatggattagctttagaagcaataagattaacatttaaatatttaccagatgcatataatggaggaactacaaatattaaagctagagaaaagatggcgcatgcatcatctgtagccggtatggcttttgctaatgcattcttaggaatatgccactcaatggctcataagttaggagcattccaccatgtacctcatggaattgcaaatgcattattaatagatgaagtaatcagatttaatgcaacagatgcgcctagaaagcaagctgccttcccacaatataaatatccaaatgcaggatggagatatgcaagaatagctgattatttaaatttaggtggaaatacagaagaagaaaaagttgaattattaattaaagcaatagatgatttaaaggccaaagttggaattccaaagagcataaaagaatttggagtttcagaagaaaagttctatgcttcaatggatgaaatggttgagcaggcttttgatgatcagtgtacaggtgcaaatccaagatatcctttaatgagcgaaattaaagagatgtacataaaatcgtataatggcagcaataaataaaaacgataaataataaataaaaacaaaagagctatatcaagacaaacaagtaatattgatacagctctttcgttaatctaattatataatctcaaaggttgttttatgcagccctcatagttgaatcattaacgtctctatctctattcttttcattttttctttcaataaaatctctaacaaccttaatactttgtattattaaagttggaatgaaagcaaataagtgtactaacattaattcattactagtaagtggagttatttcaaataatccttgaagtgctggtataagtaaaactgcatttacaagtacaacacctgatataaaggcaatccaactaaatttattattaaaaactccaagagcaaagatggattttttacctcggcagttaaatccgtggaataatctagctaaacataaggtactaaatgccatagtcattgcaagcccatggcttcctgtagctaaaccaatatgataagaaaccatagtgaatattccaatcagcaaaccttgactacaaatatctattataaaatctttagttaaaatagattctttagcatctctaggtttatcttttaaaacatcttttttagatttttccataccaattgctatagcaggtaaactatctgttaataagtttatgaataataagtgcacggctgcaaatggaacagggagcgcaaatattgatgaatatagtactgcaagaattccagaagtattacctgaaagtaggaattttattgaattctttatattagcataaatgtttcttccattagtaactgatttaacaatagtagcaaagttatcgtctgttaaaatcattgaagcagcatcttttgaaacttcagtgcctgttatacccattgcaataccaatatcagcttgctttaatgcaggtgcatcattaacaccatctccagtcatagctacaattttacctttgttttgccatgctttaactattcttattttatgttctggagatactcttgcataaacggaaatgtgctttaattttgagttgagttcgtcatcggacattttatcaagttctaagccttctacagctaagtcaccatcttgtaatattccaatttctttagcaatagcagaagctgtaatcttgtggtctccagtaatcataattggtttaatagaagctttaatacagtcactaacagctgctttagattcttctctaggtggatcaatcattgaaattagacctaagaaagtataatcatattcatcatctaaagtgagttctttattttcattaagctctctataagcaaatgctaaaactcttaatccttgagatgataattctctattaacattatttatattgatcttatcgttgttagtgaagtttgttacgccagatgaagtttttatcgaagttaccctatctagtaatacatcaagagcacctttagtaaccattacatattttccattaatcttgtgaagagtactcattagttttctatcagaatcaaaaggaatctctttaagcctcgggtaattatttctacattcaatttcatttaaggagtatttatgacctaagtttactaaagcaacttctgttggatctcctatctcagcaccatcttttgaagtagaatcgttacatagtacggagctagttaaaaggaaatttgaatcagaatttttgaaatctattttagtactatcaattaacttattatcaacgaaaatctttttaacagtcattttattttgagttaatgtaccagttttatcagaacagataacagatacacatccaagaccttcaacagcttttagctttttaatgatagcattctctttggccattgattgtgtacctatggcaagtacaattgtaactatagaactaagcgcttcaggaatagcggcaacagcaagagcaacagcaaacattaatgaatctaatagatcaatacctctatacatacttaatccaaatacaataacacagataccaattatcccaaaggctaacttcttagaaaactcatccaaggaaatttgaagcggggtatttttttcttgagtttcttccataagagtagctattttaccaagctcagtattcataccagtattagttacaagaacagtagcacgtccataagtgactagtgaactagagaaaaccatatttttttgatcacctaaagcaacctcatctttatcaataacatcagagaacttatccacactctcagattcaccagttaatgaactctcattaactttaagagagaagttttctaaaattctaccatcagcaacaactaaatctccagcctctagtatcaaaatatctcctggaactacagtcttagaagggatctcaattttaactccattccgaataactttagtattaggtgcagatagcgcttttagactagctaaagattgttcggctttaacgtattgaacagtacctaaaatagcattcatagttataacagctaaaattacaaaagtactttccatatttccagtcatagctgaaattatagcagcagcaattaatataattactaataagtccttaaattgttctagaaatacagataaaatgccttttttctttttttcatttaaggtgttttcgcctacagagtctaatatttcattagctttttcactcgtcagcccctttaaagtcacatcgaaggttttaagagattcttctactgttttagaaaaatattttttcattatgccatcttcctttcaaagaaaaaatttaataagtatataattagctaaagtctataaagtgaacattttcaggtagagtttaacttataccctcaaggggtacctcgtccaggaatgtacagttgttatacccaagtgaagaagagctgttactgatgatagatattggataaattaacaacaaaaaagacttttaatataacttcaaattgttgaagttatattaaaagtctcgttacctgttagggtatataacaccagactaacaatatagtcgcgattgttgatgttatatttataactactcccttttaatatagtgatttattttatgtaatgattatagcattttatatagttttagtcaacacactaagagttattttatacggtatatattatttacactccataaaaaaacaaataagtaaactactgtttaaggcatatgtaaaattataactattgttatcacattggttaatatgtataattataactgcacacgttaacaatattacgttatgtatgtaattatatatttaggccatagggggacgttgaagtgagattgaaaaaagtaaaagatgtaaaaatcataaggagtataattataatagtaattttatctttgatatcaacaattactattggagttttgggttatttaaatacatctaaaatgtatgatgccaacttgataatgtataataatgttattccaaaacttagtgattggggtgatgttaatggcagtatgggtgttttaagaaatactttaacaaaaataatagatagaccatttgatgaagcaaatgaaaagactatgctagaattaaatgcgaatataacggaaatagtaaatagacaagctaaagaatcagaaaataattcagaagaacaccaattagttatgaaatttaaagaagaatatgaacaatattattcgtacatacctggtattattgatcaaagaaaacaagacttaactccagataaaaagattacaaatgatgctatgggggtatatggaaatcaaattgctcaagataataaggcattggttcaacttcaaaaggataaagctacaagcgagattaataaatctatgagtgcatatagaaaaaatatatttatgtttataagtatattgagtatatcaattctggctctggcgtttatgtcaacatatataatattcatgattaagaattcaattaaagaatttgtacataaagtttcgattttatcagaaggaaatttcactgtaaagtttgatactgaatccacgaacgaatttggagtgatgcagaatgcattaagcaagactatagcatctatagcatcaattatatctatagtaaaggaagattcgaatcttgttacagagcaatcaatagagctttcaagggtttcagaaaaaatgaagcattatataggagatgtatctagttcaattcatgatatagcagaaggatctaatgaacaatctgaaagacttatgtcaataaacaataatttaagttcttttagtgataaattagattcaataacaagatctgtagagaaagtggacaaaagcactattaatattagtaatgaagccaatattagtgatgagagattgagaaatataggcatatcaataaatgaaattgcagaatcttataatgaagcacaaaggaaagttaataaattaagtttaagtgtaaataaaattacagaaataactaatatgattaatgaaatagcggatgaaaccaatttgttagccttaaatgcggctattgaagcggcaagagcaggtgaagcaggtaagggattttcaattgttgcagatgaaattagaaaattagcagagcaatctaaaaggtcatcagaagatattaatcatcttctagatgacataagttcggaaactaaattagttgaagaaacaacagatgttgctaacaagaaattagaggagcaaattcatacaatagcatcaaccatagtttcatttaaagaaatagtagaatctataggtgatatagttcctcaagttcatgagataaatgattcaatagttgatattaataatagaaaaaataatatagtagaaaatgtggaattatcatcggctgtatcggaagaaaattcggctgcatcccaagagatatcagtatcagcccataaaatggataattcagcacataaggtttctaaatctgcagaagaattgaaagatataatgcagcagattacatctcaaattgagaagtttgttctttagcataaaaataattaaatatggataaatattagtttataatgggaacctgtatgctattagaagtatagaggttctcatttttattataaatttaagaaatttaatatatagtaactaagaataaacgactttattaaaaaactagaaattccattgatgtaagtttttatgtgattaaatttattatttaagttataatatatattagtatttattgtgtatggaggtttttttatgacaggacttgtacttgaaggcggggcatttagaggattatttacagcaggtgtgttagacgcatttttagatataaaggcagaaataaaatatatagtaggagtatccgcaggtgccactaatgcatattcttatgtctctaggcaaagaggaagaaacttagagataatggaaagatttatggataataagagatatataagttatagaaatttaattagatgtagatctcttatggacttagaatttgtatttgatgagatacctaataagcattgtccatttgattataaggcattttatgaatttgatggaaagatgttagcaggtgcttttaatgttgagactggaaagaatgagtattttgataaagatttattagataagagaaactcaattcttagagcaagcatagcaataccattggtatttccgtttgaaaagatagacggacaatattacgctgatggaggcctttcagagcctataccaattaataagtcaatagaagatggtaatgataaacatataatagtattaacaaggaatgaagggtatagaaagacaaaatcgaaagcaaatgaagtaacttatagactttataaaaataagtatccaaagcttgcagatgtactaaaaaataggcatattaaatacaataagcaacttgattactgcaaagaattagaggaaagtggaaaagcacttataataagaccaagtataagtatggacataagtagatttgagagaaataaaagtaaactaaaagcaatatatcaaaatgggtatgatttgattattcaaaacaaagaaaaaatactcaaatatatttgatagtatttaaatataatattttagagaagtatttttaaatagataaattagtatgtattataaatgtgcttaagtagaatagaatgaattttaaaatctgcaaatgtaggattctagctgtttttgatgtataatgtactaataaaatataaaattttagacaataaagcgaacaagggagatatatatgtttacatccaatagcaaaacacctaaagtatatcatcaagttatagaacaaattaagaacaacataaaaagtggtaaattaaaaaagggagatagattgccatcagaaagagaaatgtcagaatctctaggagtatcacgtgcatccataagagaggcattgagagcattagaagtggtaggacttgtggaaagcaggcaaggcgcaggaaattatataaaaactaattttgataattcattatttgaacctctttctgtcatgtttatgttacaagaaagttcaattgaagaaatgtatgatttaagagaaacgctggagcttcgttgtgctaggttatctgctaaaaatatagaaaataatgagctagagcttttaacagcaatattagatagaatgtatatagcagaaaatgaggccgagagtcttgaacttgatattaagttccattatttaatagcgaaaacctcaagaaatactttacttataaatgttcttgaagttatatctcagcttatggatgaattcattcgaaaatcaagagcgcaaattttacatacaggaaaaactagggagaatttattagagattcatgagaatttagtgagagcattgaaatgcagagatgctagtaaagctcataatgctatggtggagcactttgatttaattcgaggatcctatgggtataaaaaataaaagtatattgttttaaaaataagatggataaaagataatcgttagtgaggttattttttttatccattttatttttgttatattttaaacaaaaaatgcttaaatacgattaattaaaaatataaattaaatttttattaaattttatataagcaaaaagatatagaatatgaggcactaaggagtatattgcaatagagtcaatgtaaacattttctgttaaataaataacaatactttacaaactatattttggaaagtataattaaattgaaattggtcataccaatttgatattggtatgacatgttggaaaagaggaggaataaattagttttattgtgactctagcaaaaactattatatatagcggaataattaaactgatattggattttatcaagaagtatattggaataagttttaaaagtttgtttattccacattgttttgacaagactactactattactttgccaatcagtgtttggaatttaaaatacagttttaggaggaagttatcatgaatattttagtttgcattaagcaggtaccaggaacatctaaagttgaggttgatccagttacaggagttttgaaaagagatggcatagactccaaaatgaatccatatgatttgtatgctcttgaaacagctcttaagattagggagagtgaaggaggaactgttaaagtcttaagtatgggtcctaatcaagctttaagtgtaattaaggaagcttacacaatgggtgctgatgaaggtacattattatcagacaggaaatttggaggagctgatgttctagctacatcgtatacaatagctcaaggcgtgaaaaagatgggagatttcgaacttattatttgcggtaagcaaacaacagatggagatacagcgcaggtaggatctgaaatggctgaatggttaaacataccacatgtagctaacgttaaggatatagttaaagtagaagactcaacaatcacagttgaaatggatatgccagaaagtattgaaacagtaaagatagcgtacccatgtctaataactgtagataaaggaattttcgaacctaggttaccttcttatagaaaaaaactttcaactaaagacagagaaataaagatattaagcctaaaagattttgatgataaagatgagaaaaattatggacttaatggatcaccaactcaagtagagagaatatttccaccagaagttaataatgatagagaaatgtggacaggcagttctagtgaattaagcggaaaaatgggagagaaattaaaagaattgaaattcatttaggtattaaatatttagtaaagatatctcacaaagataattaaaggggagaatgcgttatggcaaagttagtagtaaatcaagagaaaatattagatattgatgagttaattaaaatatgtccttttggtgcccttgaaaataataatggagttgttgaaataagtggagcatgtaaaatgtgtaagctttgcgttaaaaagggacctaaaggagctgttgaatatatagaggagcaagtcaaagagatagataaaagtctttggaatggaataggagtttatgttgatcatgtagatggagaaatacatcctgttacttatgagctaataggaaaggcaagagaattagcaggaaagataaatcatccagtatatgctgtatttatcggaaataatatttctcataaagctgaagaattattacattatggtgtagataaggtatttgtatatgacgatgaggaattaaaatattttagaatagaaccatatacagctgctttcggagattttataaataatgtaaaaccaacagcgattttagttggtgctacaactataggtagatctttagcgccaagaatagctgccagatttaaaactggacttacagcagattgtacaatattagatatgaaggaaaatacagatttagttcaaattagaccggcatttggtggtaatataatggctcagatagttactccaaattctagacctcaattagcaactgttagatataaagttatgacagctccaaaaagaaacgatgatatttcaggagaaatagtagaatgttctatagataaggaaaaacttttatctaaaattacagcccttagtataaagaaaaaagatgctgaagtaggaataagtgatgctgaagtaatagttgcagcaggaagaggaattaaatcagaaaaggatttagaattagtaaaagaattagctaaacttttaggagcagaatttgcatgtactagacctctaatagaggcaggctgggttgatgcaaagagacaaattggattaagcggtagaactgtaaggccaagacttatcatagcttgtggaatatctggagcagttcaatttacagctggaatgaataattcagattatatatttgctataaatgctgatgataaagcaccaatatttaaggttgctcactatggagttgttggaaatttgtatgaaataattccagaattaatagaaaaaataaaaatggctaaggaggcataggtgatgagttacaaagaagttgaattaaaagattatgaatatatattatctatagcagagaatgatttggagagagttttctttagagaagaaataaatgaagactatagccatgatgaattaggcggaattaagaaaatgcctgatatagttattcaaactataagtgctgatgaagtttcaaaagtaatgaaatatgcctatgagaataatattcctgttactccaaggggatcaggaacaggacttgttggagcagcggttccacttaaaggcggaatagttatagaccttagcaggatgaataaaattttagaattagatgaagaaaatttgactcttacattagaaccaggtgtattacttatggagataggtaaatatgttcaagaatttgacttattttatccaccagatccaggtgaaaaatcagcaacaattggaggaaatataagtactaatgcaggaggtatgagagctgtaaaatatggagtgactagagactatgtaagaggacttgaggttgtattaccaaatggcgatatagtaaatctaggaggaaaagtagttaaaaacagctcaggatatgcactaaaggatttaattgttggttcagaaggaactttaggaatagtaacaaaggctattttgaaattgttaccacttcctaaaaaggctttaagcttgcttattccttttgaaagtctcgaaagagcgatagagactgttcctaaaataattaaatctaagtcaataccaacagcaatcgaatttatgcagagagaagcgatacttgctgcagaagaatttttaggaaaaagttttccagataaatcatctgatgcatacctattactaactttcgatggaaattccacagaagaaattgaaaaggattatgaaaacgtagctaatatttgtttagaagctggagctttagatgtattaatctcagatactgaagaaaggcaagaatcaatatggtcagctagaggttgtttccttgaagcaattaaagcattaactactgaaatggatgaagttgatgttgttgttccaagaaatcaaataggaaagtttgtaaccttcactcatgaacttgaacgtactgctaatataagaataaaaagctttggacatgcaggcgatggaaatcttcacatatatatattaagagatgaccttgaccaagaagcatgggaatctaaattaaaagaagttatgcaaataatgtataataaagctaaagaattagatggccaggtgtcaggagaacatggaataggatttgcaaagaagggatatttaaaagaatcacttccaagtgaatgtattggaataatgcaaggaattaaattagcttttgatcctaagaacatattaaatccaggaaaggtatgtgaatagaataaaaaagtatttaatttgaatactagcaaattataaatataaataatttaactaggctttatttacaaatcaaagctgtcttaaaatagaaatttaatttctattttgggacggcttatttttatacataaaaaagtaaacgcccgacaacttacctttttatgtataatttattcacagctaaagaacaagttaatataaaagaattataaaaatggaattgagatttataaattaatagttctcattaaaagaaaaaattaaaattaataaaacctttttattaatttactcctcttatattataggagctccaataaagaagagaggtgcaaagatggagatagaagaaatggtaacgcgttgcaagctcggagagaaagaagcatttcgcgaacttttgcaaactgtggaaaaaaaggcgttggctaccgcatactttttatcaggaaatagaggaattgctgaagacatacttcaagaaacatatatgaaatgcttcatagaaataaataagcttcacgagccacaagcatttaaagtatggttttttaaaattcttatgcgaacaggctggaaaatgacaaaaaagcaatcagagttagttccgttagaaataacatcagaaaacgaaagtttattttttgatgaaaatcaagaaaaagaaaacataattgatagatatgagataaaacatgtaatgcagagtgcaatcaataaattaagccctaatttaaagacagttgttattctctattattataatgacatgacaatagaggagatttcaagggttacaggttgttttaaggctacagtaaaatcacggttattttatgccagaggtgctttaaagaagcaattaggcaattgctttgaggtggaaaacggaatgagcatagttaaatagaaaggagtctaattaaaaaatgaaagataagggttatttggataagttaataaagagtgctgtagatgatagtatttttaatattaaagcttcaagagatatttttaatgaggcttggaataataaggagaaagaaatgggaaagaaaaagtattttagtataaagaatataagaaaagaagtattagttcctgtatgttgcgtattatttgctattgttggtgtttttacattttccccaggagcaagggctgctgctcaggaagcgttgaaaacaatatttttacttgataaatcaggtaatattgttgagaaatcggaagatgaggctgttgatgatgttactgttggaggttttgagataacggataaaaacaaaaatgagatagaggggaaatttggatttgaatttaattttcctgaaagagttgggaatttctcaattacagaaattgcaggatatcctgtgtctccatcagcgattatgactgttaaagatttgaaatataaagatgaagaaaactcattagataagtttagaaaagcagtaggagatgataaaatatttaatgagcttagtaaagagtataagattaaaagaaatatttgtgaatcatatgaggatagtgagaaacataaatttttcatatacttatcaaaatttagtgaggattcagaaacgaatagtgttaaagaaactactattgataatataaaatgtagagttttagaagaaaatagggctaaatatgaaagaagtgagaatggtgatgacgtgacaaagaagcctattagtgttaacaaaatatattgtatggtttgggattataatggagtaagctacaggatatatattggagaaaattcttcagacattgatgtagcaacacagtttgcaaaagattatataaagattctaaaacaagaatagaaaaaacaaagggtaagggagtgatctcttaccctttgttttgaaaggggtatattttaataaatataatataaaatctatgatttatagaataagttaggaaattgaacctttaggtattgaagattaaataatcttctttaaataaatcaatattatcttaattaaactgtatgaaataataaaaaatacattgaaaattgattgtaaataatataaaataaggatataatgatagcaaataataataagtaagcagaaaggagaaagagaaatggatgaattagcaatgtctcgaagaattaaaaatttaaagaagaagatgttatctgaaaaaagatatgcatctatcgaacaagcacttataataactgaaacttataaagagaatgaagataaaccagttattataaaaagggcattagcattaaagagttctctttcaaaattagaaattggtgttaatgatgaagagttaatagtgggtaaccgtactaaaggggtgagatatggtgttgtttttccagagagcggtagctcatggattgataaagaatttgaatccttgccaactagacctcaagataaatttaatgtgaatttaaatgatatagaaacatttcgaaaagtgattaagccatattgggatggacactcattagaggatgtcattagacagagatatggaaaagaaattgatgaaattgcaaaagtggtaaagataaatcaaaaagaccatgctcaaggacatatttgtccaaattgtagagaatggcttacactaggaccagaaggaattaaacaaagagctattaaaaaaatgaagaatgctacaaaagaaagtaaagaattttatgaaagtgtaatcattgttatggaaggtgctcaagaatttatgatgagataccatgacttgctgaaagaaaaagctgagtcaatctgcgaggaagaattagtatcagatatgcttcaagttgcagagatttgtaagaatatttctagaaggccggcacaaactttccatgaggcagtgcaagcaatttggtttctatttgtgatacttcacatggagtcaaatgcgtcatcattctcaccaggaagaatggatgaatttttatatccatattataaaagagatatacaacttggaaatatagatgataaaaaggctttagaaataattgaatgtctttggcttaagtttaatgaaatagtttatttaagaaattcccatagtgctaaattttttgcaggatttcctataggatttaatattgcaattggtggccaagatgaaaaaggtaatgatttttcaaatgaattatctttcttattcctaaaagctcaagaacatttaggtctgccacaacctaacttatctgtaagacttcataagaacacatcagaaaaactattgaaagagagcataaaagttgtggcaaaaggcagtggaatgccacagttctttaacgatgaatcagtagtgccgtctatgatagacttaggaattaaagagaaagatgcaagagactatgcaattgttggatgcgtagagcttacaactcaaggtaataatcttggttggagtgatgcagcaatgttcaatttaaataaggttttagagcttactctaaatggtggaaaatgcttaatttcaggagattcattggctcaagacttaggtaacctaatcacttacgaaaagtatgaagatttagaagaagcatttgctaagcaaatagattatttcatcgatagaatgattttagcatgtgaacaagttgaaaaagctcatatagatgttttaccttcgccattcttatcgtcagttattgacgactgcattgagaaaggtgtagatgttacagcaggtggagcagtatataatttgtcaggaattcaaatgatacaagttgcaaatttagcagatagcttggctgcaataaaacttttagtatacgatgaaaagagaatttctaaagaggatttgttaaaagctcttcaaaataactttgagggatatgaagttataagggctatgctattaaatcgtgcacctaaatacgggaatgatattgaatgggtagatgaaattggtgctaagtgggcaagatatttcaatggaaagcttaaatcttatacaaactatcgtggaggtaaatatcatacaggaatgtatacagtatcggcccatgttccaatgggtgaaaatgtaggagcatctgcagatggaagatatgcaaaggcacctttagctgacgggggcatgtcacctgtatatggaagagacatttcaggacctacagctgttttaaaatctgtatcaaaattagataatgtattaactactaatggtggcttattaaatatgaagttcttgcctgagttttttaagaatgaaacaggtatagataaattctcaaaatttttaagaacctttgtggatttagaaataccacatattcaatttaatgttttacgtaaagaagatttattggcggcacaaaaggatcctgaaagttatcgtagtttaactgtacgtgtagcgggatatacagcatatttcactgaacttgcaggagaattgcaaaacgaaattatagcaagaacaagttatggggatatatagcctatggaaagaaattatacttctttaacaggaagaatttttgatataaggagattttcaacacatgatggtgatggcataagaacaacaatttttttaaaaggatgtccgcttaaatgtgtttggtgtcagaatccggaaggtatttctccagaggagcatttgattcattttgaaaataagtgcattaattgtgatttatgtgttaaaaactgctctaataaatcaattatacgagaaaataataaaatatgtgttattcaaaataaatgtacagatgagcaaaataaaattattacagatatttgtccaactggtgcgttaactatggactctaaaaattatactttagatgaagttatagaaatagcactgaaggataaagtgttttttaaatacggtggtggagtaactttatctggcggagaaccattgtaccagaaagaatttgtagttgtattacttaaaatgttaaaagaagctggagtaaatacagcaattgaaacatctttattcgtccctactcaatatataatagaagcgctaccgtatctagatacaatttttgcagatttaaaagtatttgataatgataagcataaggcctttactggtgtaagcaatgaactaatcaaaaagaacatcaaatttattttagaaagcaataagaaagataatgttattatcagaactccgctaatacctcaatttacagcaaataaaagtaatattcatgatataagtggatatatttcaagcatttactcaaaagtaaggtatgaactattaaattataatccacttgcaaaatcaaaatataacttaatcaataatttagattattgttttgaagagaatcctaaaatgtacactgagactcaaatggaggaattttatgatgcagcttattcagctgggatagaaaatttagtgaaatagttgttttatatatacattgattgctgaataaaaagttataaataaaaatgttttattctaatattctaaagttccaaaattctaaaattcttaagaatatatattgtttagaatattacaatataaaaatatatattcttggaataggagtattgttttatagcgtttatagcgcatttaattaatttaaatatataaattaaaaagagagagggagaagaaaaatgttaatgttaattgatgatgcaaacttagatgaaattaaaagaatttatgagttttacccatgtgatggggtgacaactaatccatctattctaaaaaaacaaggtggaaatcctatggaggtattaaaagcaattagaggattcttgcctcaaggtgctcaattacatgcgcaagtagtatcgctaactgctgagaaaatgattaatgaagcacatcatatgttagatgtccttggaaaagatacttatattaaaatccctgtaacacctgaaggaataaaagctatgaaattattaagcaaggaaaatgtaaatatcacagcaacagctatttatacttcaatgcaagcattcatggcatcaaaagcaggggcaagatatacagcaccttatgtaaataggattgataatatgggagctgatggagtccaagttgcaaaagatattcatgacatgtttaagatgcatggattaaattcggatgtattagctgcaagcttcaaaaactcacaacaagttttaaatttatgcaagtatggaattggatcagttacagcagcaccagatgtaatagaaggattaataaaacatgatgcgactaaaagcgcagtagatgtatttacaaaagatttctatagcctagttggtgaaggaaatacaatggaaggtctataattcattgaggagagaatttaaaggaaataatttagtgttctttttactatagactcacacatacaaatattttgacatataatgaactagtatcattacatggagttgaaaatgcgtgatatacgggctgattttagctggaggtaagggcagtagactatatcctctatcaagagccgatcaaccaaaacaatttttaaagctaattaacgataaaagtttcttagttaatactgttgataggataataccattaatagacagggataatatttatattgtgaccaatatggactacaaagaaaaggttaaggatgaactaataggaattagagaggaaaatatttttgtagagcctgctaataaggaaactgcaacttgtataggtttgtctgcagtaaaattattaaaacaagatgctaatgcagtaatggttgtattaccatcagatcactatattcaaggtgagaagaattatatagatactttatcacaagcaatagaaatggcaaataggagaaggtgtatcgttacacttgggattgaacctagtagacctgaaacaggatatggatatatagaaatgggggaaagaactgctggaagtataccaacttatagaattgcaaggtttacagaaaaaccaaattcagaggtggctaaggactttatattaaaaggaacttatttatggaattctggaatgttcatatttagagctgatgttatcctaagagaaatagaaaaatacttgcctaaattgcataaatcattgatggaaatatataaaaatttaggagaagaaaatgaagagagtgttataaaagagcaatatgaacttatagacggaatttctatagactttggagttatgcaaagaacaagaaaagcatatgttattaaatgtgattttagttgggatgacatgggaagctttggcgctttaagtaggttactgagcacttatagaaataatagtatatctaagaatgtttatattgacgattgcgagaattgctctatatttggggacaagaatctgataattgggtttggaataaaagatctagttgtagtagatgctggagatgtcattcttgtaatggataaaaataaggatcaggaaataaaacatttattaaataggctaaacgaaaataaagaatataataaatttctatagtaagtaagctgtttcaagatatcttaatgatattgaagcagcttatttatctttggagatgcacttagaaagcatgtgtaagttagagttagtctattattacaaatgtgaatggagttttataggtaacaatgaaggggctgtaggaagaacgatatttaagatttagaacaatagaagatcgtatacaagaaatctagatactttcaattaatgtatcaggatgatatgatgatttaattgttgaaatacaaagtcgttagtatattaagttattaaatagttagtttaatagtataattaatatcatgattaatactataaattatatgaattagtatataaggaaaccatatgaaatgtatgcttaaactatattaaactaatatttttgctaatatagtttaatacgttatgagctttgatattcttgggtattagtacatataatactcataggaaccagttaataaggtgttgtaaatttgaatctagagtattattatgaatatacaaaacaaatttaatttatgaaaaaataacgaaatgcctaaatgaggtatttataaaatataaaatataaaatttaatatgcagaggatgtgatcaaacattgatgatcaatactcacaagattatggcagaaaatattataaaatatgctaatacaaagagtatttatttaattaataataaaaggtttatatgggggaatgtgaaacctgattgtgcacctaaatataaatttaagaaacattattttaatgaaagtataaatatgattattgaaaagattatacatttatcatcattatcgttggaagaaatatactatgatatgacaattggtaagtttagtgaagagcttggagtaatatgtcactttttatgtgattttttctgtgcaccacactattatagatgggaatttaagagtacgagagctgtaaaacaccatatgatgtatgagaaaaatttagctaaggtagctaagtcgtttgatccaacaggaattataaatacacatgtagattcaagtaatatagaagagtttataatgcagctacagaaacaatataatggaacgataaattattataatgatttaactttttcatactatgtttgtgatagcgtactaaatatgatattgaacaatgtgtttatcaatgaaaataaggtaagtaaagtaatttagtttcttgagataagaaatatttcaaaatggttgaaaaattattttgaaatatttttttgattttgttaaaaggcataaaattttataaagatattatttaatataaacaaaaattacaatgttaaaataaaattcttgaagacatgtttaagtattgatattgttattatatagaaaaggttaaaaataaagcggtttaaattaaaaaaagtggtcaaaatataaaaaagtaaaatttcatagtagtaagctttctggagacttctggtgtttatcaagagaaattttaaatttataggaacttttgaataaataatttcattaagcttgacataaaaatatagaaatatggtagaattataaattatagcaattaattaaaatttaacaatgtgaatataattttaaaattgattgttaataaatagactaattataattaataaaagtctaaatagtaattatataatttagtttgatataaatattatagggtcgaaaaatataaaagtattgaaataggagaaagtagatatggaaaagcataaaaatatatcgatggcagttatcaaaaggttgcctaagtatcatagatatcttgaagaacttatgaaaaatgaggtggatagaatttcttcaaaagaattaggagaaaagattggctttactgcatcacaaattagacaagatttaaattgttttggagattttggacaacaaggttatggatataatgttaaggaactatatacccaaattagcgctatattgggattagacagaggttatgaagctgcactggttggcgctggaaatatagggcaagcagtttcgaattattctagatttgaaaatttaggatttaagataacagcaatatttgatgcaaatcctaaattaataggaatgaaaatcagagatgtagaaataatggatatagacgaaatggaatcagtactagaagaacataaaatagatattggtataatttgtgttcctagaaaaaatgcgcaagttgttgctgatgaattaataaggggtggagtaagagcaatttggaattttgcacctgtagatttagtagttccagatcatgtaaaagtagaaaatgtacatctaagtgaaagtttattgactttaatttatttgttaaatgagagtgaaagttaaaagtataataaacatatgcaatatattatttaaagcttgttcaaaaaataacagatcaaatatatatatttgtttttagaaatagatttaagaaaattttatccaaaagctttacatgaataaagttttcttctctgtttggcgtgaaaatagatatatacctttgatcagttatttttttcatatacttaaaaacttatattaataacgcaatattttattgcaaataatctaggaacgtattataattttaattgaggcgtgaagtcttgatatttttttaaacttatttgttatattattaacaattaggataaaaaatataaaaaatagtgtgaaaattaaaaaaataagcaagtttgaaggaggtccttagaatggaattaaaaaatgttattcttgaaaaagaagggcatttagctattgttacaatcaatagaccaaaggcattaaatgcattgaattcagaaacactaaaagatttaaatgttgttttagatgatttagaagcagacaacaatgtgtatgcagttatagttactggtgctggtgagaaatcttttgttgctggagcagatatttcagaaatgaaagatcttaatgaagaacaaggtaaagaatttggtattttaggaaataatgtcttcagaagattagaaaaattggataagccagttatcgcagctatatcaggatttgctcttggtggtggatgtgaacttgctatgtcatgtgacataagaatagcttcagttaaagctaaatttggtcaaccagaagcaggacttggaataactccaggatttggtggaactcaaagattagcaagaatagttggaccaggaaaagctaaagaattaatttatacttgtgaccttataaatgcagaagaagcttatagaataggcttagttaataaagtagttgaattagaaaaattgatggaagaagcaaaagcaatggctaacaagattgcagctaatgctccaaaagcagttgcatattgtaaagatgctatagacagaggaatgcaagttgatatagatgcagctatattaatagaagcagaagactttgggaagtgctttgcaacagaagatcaaacagaaggaatgactgcgttcttagaaagaagagcagaaaagaattttcaaaataaataattttttaataattagttaaaaatctattagagatttatatatagtttgtatcaaataggtttaattaacaaggagggtaatttaatgaatttccaattaactagagaacaacaattagtacaacaaatggttagagaattcgcagtaaatgaagttaagccaatagctgctgaaatcgacgaaacagaaagattccctatggaaaacgttgaaaaaatggctaagcttaaaatgatgggtatcccattttctaaagaatttggtggagcaggcggagatgttctttcatatataatagctgtggaagaattatcaaaagtttgtggtactacaggagttattctttcagcgcatacatcattatgtgcatcagtaattaatgaaaatggaactaacgaacaaagagcaaaatatttacctgatctttgcagcggtaaaaagatcggtgctttcggattaactgaaccaggtgctggtacagatgctgcaggacaacaaacaactgctgtattagaaggggatcattatgtattaaatggttcaaaaatcttcataacaaatggtggagttgctgaaactttcataatatttgctatgacagataagagtcaaggaacaaaaggaatttctgcattcatagtagaaaagtcattcccaggattctcaataggaaaattagaaaataagatggggatcagagcatcttcaactactgagttagttatggaaaactgcatagtaccaaaagaaaacctacttagcaaagaaggtaagggatttggtatagcaatgaaaactcttgatggaggaagaattggtatagctgctcaagctttaggtattgcagaaggagcttttgaagaagctgttaactatatgaaagaaagaaaacaatttggtaaaccattatcagcattccaaggattacaatggtatatagctgaaatggatgttaaaatccaagctgctaaatacttagtatacctagctgcaacaaagaagcaagctggtgagccttactcagtagatgctgcaagagctaaattatttgctgcagatgttgcaatggaagttacaactaaagcagttcaaatctttggtggatatggttacactaaagaatacccagtagaaagaatgatgagagatgctaaaatatgcgaaatctacgaaggaacttcagaagttcaaaagatggttatcgcaggaagcattttaagataggaggacttttagaatgaatatagtagtttgtgtaaaacaagttccagatactacagcagtaaaaattgatcctaaaactggtacattaataagagatggtgttccatcaataatgaacccagaggataaacacgctttagaaggtgcattacaattaaaagaaaaagttggaggaaaagttactgtaataagtatgggacttccaatggctaaagcagtattaagagaagcattatgtatgggagctgatgaagctgttctattaacagatagagcacttggaggagcagatactttagctacttcaaaggcacttgcaggagtaatagctaaattagattatgatttagtatttgctggaagacaagcgattgatggagatactgctcaagtaggaccagaaatagcagaacatttaaacattcctcaagtaacttacgttcaagacgttaaagttgaaggaaatacattaatagtaaatagagcactagaagatggacatcaagtagtagaagttaaaactccatgtctattaactgcaatcgaagaattaaatgaaactagatatatgaatgttttagatatattcgaaacttcagatgatgaaatcaaagttatgagcgcagctgatatagatgtagatgtagctgaattagggcttaaaggctcacctacaaaggttaagaagtcaatgactaaggaagttaaaggtgcaggagaaatcgtaagagaagcacctaaaaatgcagcatactatgttgtaggaaaattaaaagaaaaacactacatctaagataataggagggtaatttattatgaatatagcagattacaaaggcgtttgggtctttgctgaacaaagagaaggcgaattacaaaaagtatctttagaactacttggtgaaggtagaagaattgctgatgaattaggagtaaatcttacagctttattattaggtagcaacatagaaggattagcaaaaactttagcagagcacggtgcagatgaagttttagttgctgatgataaaaacttagaacactatacaactgatgcttacacaaaagttatttgtgatttagcaaatgaaagaaaaccaggaatattattcgtaggagctactttcatcggaagagatttaggtccaagaatagctgctagattatcaacaggattaacagcagattgtacatcaattgacgttgatgttacaaatggcgatcttttagctacaagaccagcatttggtggtaacttaatggctacaattgcttgtccagaacatagaccacaaatggcaacagtaagaccaggagtatttgcaaagattacaactgatccatctaaatgcaaaattgaaaaagttgatgttaaattagcagatagcgatgtaagaactaaagttttagaaactataaaagctaaaaaagatatcgttgatatagctgaagcagatttcatcgtatcaggcggtagaggagttggaaacaaagaaaacttccaattactcaaagaattagcagaagctctaggcggaactgtagctggatcaagagcagctgtagaaaaaggatggattgatggagcatatcaagtaggtcaaactggtaagactgttagacctcaaatatatatagcttgtggtatttctggagctatccaacacgttgctggtatgcaagattcagatctaatcattgctgtaaataaagatgattcagctccaataatgaaaattgctgactatgcaatagttggtgatcttactaaagtagtaccagaattaatagctcaagttaaagaaataaagagcgctgaataattattcggttaatttagatatatttttgttagattgtactattgaaagttaataatgtaacattaaagataattaattaacaatattattcaataagtaacaattagataattatgaagttaatccttagttaaaatatatattttagctaaggatatctataatgaaaagatttagaggaggaataattcatgaaaaagatttttgtacttggagcaggaactatgggtgctggtatcgttcaagcattcgctcaaaaaggttgtgaagtaattgtaagagacataaaggaagaatttgttgacagaggaatagctggaatcactaaaggattagaaaagcaagttgctaaaggaaaaatgtctgaagaagataaagaagctatactttcaagaatttcaggaacaactgatatgaagttagctgctgactgtgatttagtagttgaagctgcaatcgaaaacatgaaaattaagaaggaaatctttgctgagttagatggaatttgtaagccagaagcgattttagcttcaaacacttcatctttatcaattactgaagttgcttcagctacaaagagacctgataaagttatcggaatgcatttctttaatccagctccagtaatgaagcttgttgaaattattaaaggaatagctacttctcaagaaacttttgatgctgttaaggaattatcagttgctattggaaaagaaccagtagaagttgcagaagctccaggattcgttgtaaacagaatcttaatcccaatgattaacgaagcttcattcatccttcaagaaggaatagcttcagttgaagatattgatacagctatgaaatatggtgctaaccatccaatgggacctttagctttaggagatcttattggattagatgtttgcttagctatcatggatgttttattcactgaaacaggtgataacaagtacagagctagcagcatattaagaaaatatgttagagctggatggcttggaagaaaatcaggaaaaggattctatgattattctaaataatatcatgaatatatggaaaaaactcaagtttatgcttgagtttttttatttttatgggaatatataaataactattagattacataaataagtttaaattaaagaatattgtaaaattcaacaaaacattttattaatgctaagtaagtgatataatatattaaataataactattttcttaaaaataattacatatttaattgaaatattggatataaaaaataaatagttaaaagctatgatataggtggtatacatcagaaaatgtgcaatataaactgtgacataatctttagaaaaaaactttagtgtagaatatattatttaaagaagaatataagaatgaaataagttcaaactaaagttaatatgatattatgttcattaatcatttcactaaagagataaaaatataatttgaatattcatagtctaagggtaggattcataaatatccatactagattataagatgatggaaactaaataattttatactgtaagggagacggataataaaatggattataaatctgtagaattttatgataattatttaataataaaagaattaagcaattttaaattaaaacatatatttgagtgtggacaaatttttaggtttgaagaggtagcagaaaataattttattgtaattgcttttggaagattaattgaagttaaagaagagggaaatgacataataatttataattctacaaaggaagattttcaaaatatctggcttaagtattttgatttagatagagattactcaattataaaagatgaactttcaaaagatgttttacttaaacaaagtattgaatttggatatggtgttagagtcttgaatcaggatccatttgaaatgctgcttagctttattatttcagcgcgaaataatataccgtcaataaagaagaatgtaaataaaatatctaataaatggggaaaagaaattatttataagaataaaacttactatgcgtttcctaatatagatgaaataaaagatgctacattagaagaaatacaggagacaggagcatctttcagaagtaaatatatttttgatacaataaaaaatgtatataattctaaaacagcaaaagaggacctgaaagcaaatgatacaaatgaatatataaagtatgatctagattatattaaaaatttagatgatgatgaatgtcacaatgcacttcaagaattcaaaggtgtaggttcaaaggtagctgattgcataatgttattttcaatggaaaagacttcagcattcccagtagatgtatgggttaaacgtgcgatgattcatttttatggggcagaggatgcgtctctaaataaaattagaatttttgggaggaacaagtttggtaaattagcaggttttgcgcagcagtatttattctattatgcaagagagaataaaataaatgtatagaatagaataaaaaagtttattatagaatgaaaagtctaggattttatttcctagactttttatttcgtcaagaaatattagaataatatgttcaataatgttaataatttatcattgatgtaataatataaatgtcatataaatcccttgatataactaatataatggtaaataaacagatctgaaaagaagtggaaatacaagaaaaaactttaactaaagtagctgagaaataccactatatacatatgaaaatagaacgtatattaagaaaatttagaaaatttaaattatataatatttgttataattttaacaagagtatgctataattattttgtattataaatgtaagataaaaattattcatgggagagtgtgtgtaatgtttcagtttgagaatcaacttctagctttaaagcacgaggttcttactagagttgctgtattagcaaaagaaaataatattagtaaagaggaaatagaaaaaattccttatgctatgattgtaggagaagaacctaagtatagagattcagttgaacgagaaagaaatgtagtattagagagagcaaaacttgcagcaggatttaaaccaacaggcaaacatggacaagatttagttaatatagaagaagaaaaacaaatattatatgttataaaagaagcatgtgatagatgcccaacaaagaagttccaagttactgatgcatgtagaaattgtatagctcataagtgtcaaagtgcatgtaattttggagcaattacatatgttgatggaagagcttatatagatccagataaatgtaaggaatgtggaatgtgtaaaaaagcatgtccgtatgatgctgtagcagaagatatgagaccatgtaaaaaatcatgtccaacaggtgcactaagctataatgcagaagatttgagtgctgaaattacagaaagtaaatgtgtaaactgtggtgcatgtatgtcagcatgtccatttggagctatagaagacaaaagctcattagttaaagttattaatagattgatggataaagaagaaaaaatttatgcagtagttgcaccagcaataacagggcaatttgggcctaaaacaacttatgggcaagttaagaatgcaattaaggcattgggctttaaagatatgttagaagctgcatgtggagcagatgcagttactgtacatgaaagtaatgaatttgtagagagaatggaaaaaggggatagctacatgacaaattcatgttgtccaggattcctaagctacattgaaaaaatgatgccagatcaagttgagaaaatttcgggaactgtttcacctatggtagcaacgggtagatatataaaatctaaagataaagatgcaaaagtggtatttatagggccttgtactgcaaagaaaagtgaagtactaatagattcaataagggatgcagttgattatgtattaacttttgaagaagtagtagcattatttgatgcatttggagttgatccaacaacttgtgaagatatagttgttgatgaagcatcaatctttggaaggaattttgctgttgggggaggattaactgccgcaatacaaaattatgtacaagaaaaaggtgttaatgtagactttaaaccagttcaagtttctggtggagcggatatcaaaaaaactatgacaatggctaaggttggaaagctacaaggaaactttattgaaggaatgatgtgcgaaggtggctgtataaatggggcagctaaaattgtatcagtaatgaaagctaaagcgccatttacaaaattaaaccagcaaacacctattaagagcgtactatctaataaggtgttaggtgaatatcacaatgtaaatttagaaagataatattaatcttgattttgaaatataattaagtaattaaaaattctattattatataggtgctctaggcaatgaggtatttagaattttaaattatttatgaaatttaatagctttattctctatataatgtcataaaaactctaatcagtaatatgtttatttggttagagtttttttattattttaaaaattcataatattaataataatatggagaaaatttaagtaaatgcgatatattttgagataaggagtaatattcgctgaaaaatgggatataatattagaagtaatgtttgaattatatggatataaaggatattataattatgttagcactcaacaatgatgagtgctaacagaaaataaactgaaatgataatatatattttaaggagggttttttcatgaacattaaaccacttggtgaaagagtagtaattaaaaaattagaggcagaagaaaagactaagagtggaatagtcttaactggtactgcaaaggaaagaccacaagaagcagaagtggttgcagtaggacctggagctgttgtagacggaaatagagtagctatggaagtaaaagttggagataaagtattatattcaaaatatgctggaacagaagtaaaggttgatggcgaagaatatactatattaaagcaagatgatattctagcaatagttgaatagttaaagtgttcataactagatatttaaatataaaaaataaattcaattagaaacgataataaataacatatataaggagcgtgtgatataaatggctaagatgttaaaattcggagaagatgcaagaagatctatgcaaataggtgtagataaattagcagatacagttaaagtgactttaggacctaagggaagaaatgttgttttagataaaaaatttggtgcaccattaattacaaatgacggtgtttcaattgcaagagaaatagaattagaagacccatatgaaaacatgggcgctcaattagttaaagaagttgcaacaaagactaatgatgtagcaggagatggaactacaactgcaacattgcttgctcaagcaataattagagaaggtctaaagaatgttacagctggggctaatccaatactaattagaacaggtattaaaatggctgtagacaaagctgttgaagaaatcaaaaagatttctaagcaagtagatggaaaagaagatatagctagagttgctgcaatctcagctgctgatgaagaagttggtaagttaatagcagatgctatggagagagttggtaatgaaggcgttattaccatagaagaatctaaatcaatgggaacagaattagatgttgtagaaggtatgcaattcgatagaggatacgtatcaccttacatggctacagatactgaaaaaatggaagctgttctagaaaatccatatatattaataactgataagaagatttctaacatacaagaaatattaccagtgcttgaacaaatagttcaatctggtaaaaagttattaatcattgctgaagacatcgaaggagaagcaatggctacattagtagttaataaattaagaggaacatttacttgcgtagctgttaaagcaccaggatttggagatagaagaaaagaaatgttacaagatattgcaacattaactggtggaacagtaatcgctgaagaattaggaagagaattaaaagatgttactattgatatgctaggtacagctgatagtgttaaagtaagtaaagaaaacactgttatagttaatggtaaaggtgattctaatgcaataaaagaaagaattaaccaaattaaagctcaaatagaagaaacttcttcagaatttgataaagaaaaactacaagaaagattagctaaattagctggaggtgttgcagtaattaaagttggtgcagcaactgaaacagaattaaaagaaaagaaacttagaatagaagacgcattagctgcaactaaggctgctgttgaagaaggaatagtagctggtggtggaactgcttatgttaatgtaataaacgaagttgcaaaattaacttcagatgttgctgatacacaaattggtatcaatataatagttaaatcattagaagaaccagtaagacaaatagctactaatgcaggtgtagaaggttcagtaataattgaaaaagttaagaatagtgaaccaggaataggatatgatgcattacatggagaatatatcaatatgataaaaggtggaatagtagacccaactaaggttactagatctgcacttcaaaatgcagcttcagttgcttcaacattcttaacaacagaagcagcagttgctgatattccagcaaaggaaactccaatgccaggtgctccaggaatgggaatggacggaatgtactaaaatatataaattaaagaattataaatatttaatttaataaatagagaaagtgctcataagtactttctctattttgctttttagtattaaaaaataaagtgcttaatagctattaacatatctatgtaattttaaaaaggattttatattatatgtttaacatttaagcttatggaaatcatagcaatgcaactttatgcaaaatttatatatattagaaggcaatattagaaactattagagaatattttccatttgttgtataaaagattgcctattagacataatttaaataaaaacattaataggagatggataatgaataatgatttctttatacagtaaatgtaaatttagattcaaagatagtacgtcaaagaaaagctcgtgtaagaagagaaagagagaagcttttactttaattgaaatgattgcagtaattgcaattattgggattttagcggttgctattttgcctaaagtgaatggatatataaatgaagcgaaaaaagttaaagttgtagatcagtgcagaaaagtaataatggccgttgaatcatataatttaaaaaatgattctcccttaagtgaaactactagtgtaagttcggctataggcaacaaaggaattagtaaatatttagatggagttgaatttggtaatttaaatactagtagtacaagtttaaaaaattgttatgatgtagtaaatggtgcagaatttgatttcacagaaaatacagacattttaaatccgacgacgattgataatggatctaccaaagatgatgtaaaaaaatagaaaagatatcgataacaataaatttaacttacattattgaagtaaatttgcaattttagcttcaaatttattgactttagattgtacatacattataataattttaatttaaaatatagcacatttgaaaacttatatataccttgaatatggcaaggagtatctaccgggagccgtaaatttccgactataagtgatattagtataggctaaatctatagatttattagcatattaacatcacttttgaggttaatgtgctttttttgtacaaaaaaatagtacaagcgatgcaagtgaaaaatcataaaatactaaaaatgaaataaataattcaaaaataggaggaactataatgggaaaaataattaagactgcatatacttttgatgatgtattattggtacctaataaatcggatatattaccaagagaagtgagcacaaaaacaaaaataacaaagactatagaattaaatattcctttaatgagtgcaggaatggatactgtaactgagtcaaagatggcaattgctgttgcaagagaaggcggaatcggaataatacataaaaatatgactattgaagaacaagcaaaggaagtagatagagttaagagacaagaaaatggagtaattacagatcctatatttttatctcaagatcatcttattcaggatgcagagaacttaatggcacaatatagaatatctggagttccaataacaactcaagatggaaaactaattgggataatcacaaacagagacataatatttgaaacaaattaccaaagaaaaatttcagaagtgatgacaaaagataacttaataactgcttcagaaaatactactgtagaggaagcaaaagaaatattaaaaaagcataaagtagaaaagttacctttagttgatagtgaaggtcgcctaaagggcttaattacaatgaaagatattgaaaaagttagaaagtttccaaatgcagcaaaagataaaaaaggtagattattatgtggtgcagcagtaggtgtaactggaaacatgatggaaagagttgatgcattagttaaagcacaagttgatgttataactcttgatacagcacatggacattcaaaaggagttttagatgctgtttcacaaataaagaaaatatatcctgatcttcaagttatagctggaaatgttgctacagcggaagcaacagaagatctaataaaggctggagcggattgtgttaaggttggtattggaccgggatcaatctgtactacaagagtagtagctggagttggagtacctcaattaactgcagttatggattgtgcagaagtaggtaagaagtatggagttcctataattgctgatggtggacttaagtattcaggagatatagtaaaagcactagcagcaggagcctctgcagcaatgatgggatcattatttgcaggatgtgaagaagcaccaggggaaatggaaatatatcaaggaagaagttataaagtttatagaggaatgggttctttagccgctatggaatgtggatctaaagatagatatttccaagaaggaaataagaaattagtaccagaaggtgttgaaggtagagtagcttataaaggttttgtctcagatactatattccaattattaggtggaattaagtcgggaatgggatatttaggagcaaagaattttgaaattttatatgaaacagctaattttgtagttcagacagcttcgggtcaaagagaaagtcacccacatgatattaacattactaaggaagcacctaattatagtgtaggacaatagtaaaatgcacagttcacaatcatgaaatataccacttatgtgaactgtgcattatttgattaactgataattatagagattatttaaattagtattcataattttcggtgaaaattgtctcaatttattgataaaaagatttatttagttgataatagaatttataagaagagtttaggaggagaacatgaaaagagatttagttttagttgttgattttggtggacaatataaccaactaatagcgagaagagtaagagaatgtggcgtttattgcgagattattccatatgactatactatagaaaagataaaagctaaaaatcccaagggtataatattcacaggcggacctaatagtgtttatggggaagatactccaactgtagaaaaagaagtatttgaattaggcgtgccagtacttggaatatgctatggtgatcaattaatggcacatttgctaggtggaaaagttgcgacagcaccagtaagagaatatggaaaaacaaatgtaaaaatagataaatcatctaaattatttgaaggaatcgaaactgatggtatagcttggatgagtcatactgattatattgaagaagctccaaaaggatttaaggtaatagcaactacagaagtttgtcctgttgcagctatggaaaatgaagagaaaaggctttatggagttcaattccatgcagaagttgaacacactcaatttgggcaaaaaatgctagaaaactttatacacaatatttgtgggttagaaaacagctggtctatgggatcttttgcagaagaaaaaataaaagaaataaaagaattagttggagataagaaagtgttatgtgctttatctggtggagttgactcttcagtagcagcaatgattgtacataaggctattggtcacaacctaacttgtatatttgttgaccatggtttactaagaaaagatgaaggggatactgttgaaagagtatttaagaaggaatttgatatgaacattaagagagttaatgtttcagatagattccttggaaaacttgcaggagtatcagatccagaaactaagagaaaaataatcggcgaagaatttataagagtttttgaagaagaagctaaaaaacttggtcaaattgattatcttgttcaaggaacaatttatccagatatcgtagaaagtggaactaagacatcagcaactataaaatcgcatcataatgttggtggacttccagaagatatgcaatttgaacttatagaaccattaagagaattatttaaagatgaagttagggcagttggagaggaacttggcattcctcataaattggtttggagacagcctttcccaggtccaggtcttgctattagagttttaggtgagattacagaagaaaaacttgaaatagttagagaagcagatgctattttcagagaagaaattgcaaatgcaaatcttgatgaatctatttggcaatactttgcatgtttacctaatatccgttctgttggagttatgggagatgaaagaacatattctcatacaatagctttaagagcagttacatcaagtgatgcaatgacttctgaatgggcaagaattccatacgaaattttagatttagtaagcagaagaattgtaaatgaagttaagggagtaaacagaattgtttatgacataacttcaaaaccaccagctactatagagtgggaataggattgaggcttattaaataaggtggctagacacttaaagaaaatataataaaaaatttagtggcttagatattatctgaaaaaggtaacatttaagctacttttttattgattctttgaagatgtgataaataagaaaaggagtaaaaaaacggtaggaaagaaatttacaatgacaacgctactaacgttagattttctgaataatctttttaaagcagtaaatacatattttctctaactaatagcaaataaagtacaacagcataatatattattagatagttattaagttttataggcaaatcaataataatttgatcctagtaatactttaactaagcgctttagcaatgattaaacgaaaattaatgctgattacgaaggagaggaaataatggaaaacagaaataatagaaattgcagacgttgtaattgtgaagaagaacgtggagagatggatagtagaaattgtaatccttgtggtaatggaactcttggagctaacgtaaataatgactgtttagctgatgcgttggaagatgcatataatgatggctataaagatggatatcgtgatggttatgaggatggaaatactgcaggagaaactgcgggagagacagctggatacaagcaaggatattgcgatgggtatgaaaaagcaaaacaagaggtcttagattatattagaagaaatagatgttgtagatgctgttaagcagaactaaattatataataagtagttatataaaaaaaggtgtttataagtgattgaaaaatcattgttaaacaccttttttatttaatataaatatggttatagtgataatttaaatagttcatattagataagagttaattaaaaagttacttttaatactaattgaatacaattgtgcaaacattttctctgtagaggaaaaagacggcattaatcgttatcattttataaagtataattacattaaagaaagggggtatcgaaaacgcttgaaaaaatcaacctttgaatataagatagtcataagattatactatgagtataatttttaaagacttctaaaatcaaagaacaacaagttaaagtaagattaatagtaataattttattttaatttaaatgaattaataagtattgattcttttcaaggaggcaaaaatgaagtatttttatactgaaaaccgttcgacaagaattctaaaattaattgaacgaagacattccatttctgttgacgccattgctgaaaaatttgaggtcagttctaaaacagttaaaaatgatgtaaaagagctaaatggtttattaaaaggatctgcactaattgataataagcaaggaatatataaaatttatattatcgataataataaatttgaggaaatcaagactaatatatataaccaaaaggaatttcttaattcacctcaaagaagaatggcatttattttgtataagcttatgaatagtgaagagccatatttaactgatgacctggcgtgtgagatgaatttcggaagaacgacagtaataagtgatttaaagaaaatgagggagatacttaataactacgatttaaagattataggcaaaacaaataatggattagccttaaaaggtacagaattaaatataaggtttcttgtacttgagaacctttatgaaatgatttatggagaatacgaattagatgaagatgttattgatttagtaaaagagataacagaccaatatcagttcgatacaacgacatttgaatctttcatacattctctagttgtaactttagatcgccttttaaatggacatacaatcaatacattaagcgagaaatatggtgaattattaagaagttgggaatttacattggtaaatactatatcagatgcagttgaaaaaaggcttactataagtattccaattaaagaaagaattttcttagcattgccgattataggaatgaatactccgactaacatagaagggatttcaccacacgttgaaattacagaagaagtatcaaatttagtaaatcatatattagagcgcattaaatacgatatgggtttaaacattacgctagatgatattttgaaagactttgtataccatatggccttcttggtaaatcgtttaaagtatggggtccatattcataatcctatagtagatgagattaggaaaaaatataaagtagcttataaaatggcagaattagcgcgagatgtcattgaaaaaagtcttgatgtaaaaatgacgcaagatgaagttggatttatagcagcatattttggagtttttatttcagagcagcaaatagaaaaaagtaaaatatataaagttgcagttatatgcggaactggaagagttacagctaggttggttgcaagtcaattaaaaggcatttttgatgcgaacacagttatagatttatattcagatagcacagttactagcgaaatattagataagtataatttagttctatctactgtccaagctaactttaagacaacagccactgtaatatatttagagaaaatatttgatgaagaagcgctgaagaaaagaataaaaagtattaagtatatagataaattagacatgccatccatgcagggaatggattctatattactaagtattttagatgaagataccttctttatcttggataatcaattgagttatttagaaaatgttgatcatatgattgataatctatactcaaaaggttatgtagatgatggatttaaggaaagaataagaaaaagagaagaaaaatctacgatgatttttaatgaatctatagcatttcctcatactatcaattatgaaaatgatgaaatagtagtcagtctaggaataattccagaaaaggctggagaaaacaatcaaagaaaactagtatttttggtaggacttccagaacaaactaaggatgatacactcttggttaaaatttatgatgaaattatagctattgccaatgataagaataccattgaggctctttcaaaggtaaaaagttatagagaattaattttacattttacaaaagaaaacgatatatttgatttataagtaggaggtttatgatgaatttttggtttttgattatatgctttgggattgcatttatactccaatatatactaacatttgctcaaatgaaaagtttcacggcttactatagtaaattgcgaagaagaggaagagttgccattggtaaagtaaaaggtggttttcgtgctggatgcattgcaatgtttgctattgatcaaaatggaattatacttgaaggcggttatatgcaaggaataacagtacttgcaagggttaagaaactaaacggatttgaaggaaaagatgttggtagattaactgaagcagattgtaaggacttagctaaaccattaaccaaagcagtactagaagcctcttccaattataacgttattatgggcggtggcgaagttgcagagcctcaaagtccattacaaagattaggtaatatttttacagttaaaaaattaaaagctcacaattagaaaggagatattaatatggacgcaattgtttattttgcaaaaggatttatgtatttatttgaagttggtggaaatacatttgttagttgggtaacaggaattatcccaaaggtattattacttttagtttttatgaattcaataattgcttttattggacaagataaagttgatagatttgcaaagtttgcatctaaaaatgttatattagcttatggagttttgccattcctatcagcctttatgttaggtaatccaatggcattatcaatgggaaaatttcttcctgaaagaatgaaaccaagctactatgcatcagcatcgtatcattgtcacacaaacagcggtatttttcctcacattaatgtaggtgaaatattcatttacctaggtattgcaaatggtattacaactcttggccttgatccaacagctttaggacttcgttatttactagtaggtttagtaatgaatttctttgcaggatgggtaactgattttactacaaagattgttatgagacaacaaggtattgaattaagtaatcaacttaaggcaaattagtttaggagggtattcatatggaaaaatataatgcaattaaaattgtaaaaggtagtggaggttttggcggtccacttacagtaaaacctgaagaaggaaaagatacattgttatatattacaggtggtggagctgaacctgaaattgtagaaaagattgttagtttaacaggatgtaaagcggtaaatggatttaaaacatctgtaccagaggaacaaattttcctagttattattgattgcggtggaacacttcgctgtggaatatacccacaaaagagaattcctacaataaatgttatgccagtaggtaaaagtgggcctttagcaaaattcattacagaagacatctatgtatctgcagttggtttaaatcaaatttctttagctgattcaggtgcagaacctataaagagcacaaaagcgcctgaggaaggaaaaagagaatttaaatatagtgcggataagaaagtatcacaaagtttggctgaaaacagtaaatctagcattgtccaaaaaattggtatgggagcaggtaaagttgtaaatacactataccaagcaggccgtgatgcagttcaatcaatgattacaacaatattaccattcatggcatttgttgcgatgctaataggaattatacaaggttcgggatttggtaattggttcgctaaaatattagtaccattagcaggaaacggaattggacttatgattcttggattcatatgttctattcctctattatcagcactacttggaccaggtgcagttatagcacaaatcgtaggtactttaattggtgttgaaataggtaaagggactattcctccaagcttagcattaccagcattattcgctattaatacacaatgtgcatgtgactttattccagtaggtttgggtctagctgaagcagaaccagaaacagtagaggttggtgttccatctgtattgtattcacgtttcatgattggtgtacctagagtagcagttgcatgggttgcaagtataggattgtatcaataaactataaaatttatttaattgggattgagtggttcttatgaatcgctcaattgcaccaaggaaaatacatggccgatttagatgcaaggagtggaataaaaggaggtttatccatagtgaaactaattattgatgatgtaaatattgaaaaaataaaagatgttttcagcatattcccaattgatggggtaactagtaatccgagtattttgtataagtatggaaaacagccgtatgaaatattaagagaaatacgtgaatttattggagaaaactcggaattacatgtacaggtgatttctgaaagttcagaaggtatgcttaaagaggcacataaaattattaaagaactaggtaaaaatacttatgtgaagatacctgtaactagagagggattagaggttataaaaattcttagaaaagaagaaattaatgttactgctactgctatatatactcaaatgcaagcatatctagctggaaaagcaggtgctcaatatgctgctccatatgtaaaccgaattgataatttaggagcaaatggtgttcaagtggcaaaagatattcacgatatttttgagaaaaacaatttaaaaacagaagtattagcagctagttttaagaattcacagcaagtattagaattatgcaagtatggaattggagcggctacaatttcacctgacgtaattgaaggtttaattaaaaacgactgtgtggatgtagctgtagagaactttaagaaagattttgagatattatgtggtcaaggtaataccatgttaaattgccgataatctgagtagcttagaataaataataattttagaaagaaatatatttgaagggatgaaagcatctatgagtagtaagataatctatgaaaataaagtaaaagccttaggagatttagcagaaacattcttagaagaaggaatgataatattttttggagataatgcaccagatacactagcagattactgttactctattaatataaaggaagttaaagaaacaattaaacctggacaagtatttatgattgatggaatagcttttggaataacagctgttggagatgtggcagagaagaatctagtgagtttaggacatataactgttgcgtttaatggttccaaagtacctactttatcaggaacaatttgtgtagagaaaaaagaaattcctaaacttaaaataggaagtgaaatatctatattagcataattatatctaaaatttatatgaagtcgaaatgaataataaaatggcattaaataatggaattaaataatcaggaggaatttttatggaaaatacatggcttaatttagaaggaaaaacagcaattgtaacagggggagcatctggtattggtaaggcagttgcgcaagagtttttaaataatggtgcaaatgtagttgtttgtgatatgaatccaaacaaacctgaatttgatgatcataatggacatatggaatatatagttactaatgttgcagatagagatagtgtagaaaaaatgattgagaaggctaaagagattactgggactattgatataattgtaaataatgcaggaattaatattcctagattattagtcgataaaaaagaaccaaaaggaaaatttgagctagatgaaaatgtttgggataaagttatgaatgtaaatgtaaaaggtgtatttctatgtgctcaagtagctgctagagagatggcaagtcaaggaaaaggagttattataaatatgtcttctgaaagtggattggaaggatcggaggggcaaagtgtttatgcagcaagtaagaatgcagtaaattctttaacccgctcatgggcaaaggagctaggaaaattaggcataagagttgtcggagttgctccaggaattctagaagctacaggactcagaactttagaatatgagacagcgctagcttatacgagaggcattactgtagaagagttaagagcaggatatagtaaaacttcaacaactccattaggaagatcaggaaagctttcagaagttgcagacttagtttgctatttagctagtgatagagcaagttatattcatggagttacttacaatattgctgggggaaaaacaagaggttaaataaaaaaaggtattagtacagaataagtttaattatttggccaattagcacggaataatgttaaaaaaataacaaagttatcgagattttaataattgaaaaatatataattcacattttataaagagaaaacttagttttctcttttaaaattttgaaattaattgatatttaataaacaatattttatgactagcattaaaaataagttaatatcaataagggtaagatgaatattaattcatacaattagaaaaaatagaaccgagtaaagattaaataagattaatttaaggttattatttgatatattatttgtaaaaaagttaaaagcaaagatgagatattgagaatttatgatataattgaataataaaattatttttagttatatatggaggtaggatagaagaatgaataaaggtatatcactagacttatcaaaagtttctccttatttagaagaagcagaacttgaaaatatggaaagcatggttaaagctgttcatgaagatttacacaataaaacaggagcaggtaatgatttcttaggttgggtagaccttcctgtaaattatgataaagaagaatttgcaagaattaaaaaggcagcagaaaagattaaatcagattctgatgttttaatagttattggaataggtggatcatatcttggagctagagcagcaattgaaatgttgacaaataatttccataatgtattaggaagtgataagagaaaagttccacaaatattttttgcaggaaataatataagttcaacatatatggcagaacttctacaagtaattgaaggaaaagatgtaagtttaaatgtaatttcaaaatcaggtacaactacagaaccagcaattgcatttagaattttaaaatcatatttagaaaagaaatatggtgtagaggaagcaagaaagagaatatatgcaacaactgacaaagctagaggtgctttaaagacattagctgattcagaaggatatgaaacttttgtagttccagatgatgttggaggaagatttacagtattaacagcagttggattattaccaatagctgcggctggaatcgatattgatgaaatgatgaaaggtgctgcagatgcaagaacagcttattcagtaccatcaattaaagaaaatgatgcttataaatatgcagcagctagaaacgctttatataataaaggagcatcaattgaagtattagtaaattacgaaccatcacttcattattttaacgaatggtggaaacaattatacggagaatcagaaggtaaagaccataaaggattattcccagcggcagtagatttttcaacagatcttcactcaatggggcaatatatccaagatggaagaagaataatgtttgaaacagttgtaaatattgaaaaaccaaaatatgaaataaatatagaagaagctgataatgatttagatggattaaacttcttagctggaaagactatggatttcgttaataagaaagcatttgaaggaacactattagctcataatgacggtggagttcctaatatggtattaagtgtaccagaaatttcagcatattatttcggatacatggtttatttctttgaaaaggcttgtggaataagtggatatcttttagcaataaatccatttaatcaaccaggtgttgaagcttataaaaagaatatgtttgctttactaggaaagccaggatatgaagatatgaaggctgaactagaaaagagactttagtttaattatgaagattattattgatggagatgcctgtccgggcatctccattattgaaaaagcggcaaaagaacacaatattccagtgataatttattgtgatattcatcattttatacagagcaattattctgtagttaaagttgttgatagtggatttcaaagtgtagatatgtatgtaatgaatgaaactaaagaaggtgacataattgtgtctcaagactatggtgtggctgcaatatgtctatctaagaaagcgaaagtaataaaccctaagggatatatatatgatgaggaaaacatagatagattattggaagaaagacatatatcacagaaaataagaaggagtggaggaaagacctctaaccctaaaaaaagaactgacgaagataatgttagactggaaaaaaacttattaaaacttataactagttgataattttagaagcttagataagagcttctatttttatgcgataaaaattataaatttatattttggatattattttaagtatgactggaaggttttattaaaaaacaatcttactaatatatgagtttatataggcatttatgatataatcaaataaaaaataaactgaagttatttacaaaaaatggtataaatgtataatataataataaggatcattttgagaattggtatgagaggagtatgaatttatggaggaacttcagttaaaatatgttgagatagcttttgataagcaaacaccgcaaaaagttggaacggaaataaatatatctggtaaaatagatggagaaatagaaaacttagaatataaatttattgttggcaaaggtggggtttggaatactatacaagaattttcagaaaaaaattattgcatatggaagcctaaaagagaaggggagtatatggttatggtacaagccagagagagggatggaaaaaaacctttagactatttagccaaagaggactattctatagtgacagaggaagtgagtaatactgtggataaagagactagtattcaagatgttactaatgatgaagaaattaaaagcgcttgcaatgataaagaaagtaagttgctagcgcctgaaaaagaagatcctattttatgcaatattgaatttaaagaggcaatgaatagtatagaagataatgtggtgtttcttgaagttaaagaagtttctagagcagaaaaagaagtattaatatcaaatagctacgctgatgaagaaatatcatcttctaatgatatcaaggaagttgaagatgcagtagataatactcaatataatgaagaagttctaaataaaatattaattgaaaacaatgctcaaatagaaccaagttttataaaagatatccgtatagataaagaggaaataaaagttggagaaaaatgttgtattgaaataaagacagatgatgagaatgtatatttatatagatattatataaaaaggaataatgaatgggatataattaaggattatgataaaagtaatattttaaaatatacagcaaatgagtcgggaaataaagaatttttaattcagtgcaaaagaatggattccactgaaacttttgaagaccatagaattattacactaaaagtaagagaaattgatagagtagaaataaccaattttaaatgtttaaataacgcattaatagcgggagaaaagcttggttttatagtagaaacaaatattgaagaatctgttagtaatgaagatattgtattactatataaattttataaaatatataaagatggaaaatcaatttgtatacaagactattcaactaaaaataatgtgtattataaggaaacagaagcaggcagctacaggattttatgtcttgtaaaaagtatattttcaaataaagaatatgatgatagagctattttggtatacagtgttaaaccatataaaacgattaagattaataattttgtagctgattcgaattctcctaatataagtggaagtagtattaagtttacttcagaaatagaaggtggaaacaaagttatatatagatatcaggttaatggacccattaaacaggacacaggctttatagaaaagagtgaatttgtatggaaaccatctgaagctggagaatatgacattatactttatgttaaggatattaattataaaggtgactatgaggatttaaaaagaattacatttaatattgagaaaaagagtgaaaagccagtaaagattttagatattgtagttgataaagaaaagaagattattgttggggagccagttggtataactgtaaatgctgaaggtggagtaaagctccaatatgcattcacaattagaaaggatggaagaaggttagagggagtagattataataaatctaactggataaattttattcctaaccaggcaggagagtatgaagtagaaataagacttaaggataggtactcagataaatcttatgatgcccaaacagttatatatttgaaggcactagaatatctaccgggtgaaatagattatataatattaccttataaggaaacacatttgattggggaagctgtggagtttgaatgcattgttcaaaatacacagaatactttattgaaatatgaaactaaaattaatggacattctattgagaaaacagagttctcaaaaaataaaaagttgagatttatacctaaaactgctggtaaatacactatagaagtttatgctaagaatgttagatgtactagtgagtatgattctaagaagcagataaacttgtatgtaagtgaggcgtctcctgtaatagaaactaatataatagcaaatacactagaggggcatgtaaatgaggaacttacatttgaagccataagtagaggcgggaaaaatgtttgttatgaattttatttaatggagaataatgagtggagaaaggtacaagtatatagtagaaagcattattatagctttatgccatttactcaaggaaaatataagattttagctttagccaaaagttattataaaaaagttagttacgaggattatgctgaagtaacattttatgttaaaggtttaaaaggataactcgaaaataaacataggataaattttagagaaaggttgtttaagtatggcgatagacggtttagataaaatgtcaaatgagcaattattagcaatgaatatgctaagcaatggacaagtaacaaatgattccgattctagcaatagcacgagtggtgaaaaagatttagcatttcaattagttatgaaaaatcttatggaatcatcaaaaaaatctaaagaaaatggtaatgctgaatcaaatgagaatacaaaggaagcaaaaagtgaaacaaccaacactgagaaattaaattcaaaagataatataaatttaaataatgcagctagagtagggcagacatatgtgacaggacaaaatttagaagaaataccaatgattttaactaataattatattggttttacaagaaattctcaatctgcattgtctaataaaagtggagctgatattaagaaaatatattcggctgtagatgatgcagctaaaaaatatggggtagatcctaatctaatattagctgtaattaagcaggagtctgattttgatcctaattcaacatctggtgtcggagctgctggattaatgcagataatgccagaaaatttttcacatttaggtataactgatggatatgatgttgatcaaaatattaacggtggaactaagttgcttaaagaatatttagataaatataatggaagttcagagatggctcttatggcatacaatggaggacctggaactatgcaaagaagaggtgtatcatccgcttctgacctatataaaatgccacaagaaactcagaactatgttccgaaggtaatggggtactatagaaatggaatctaggatgttttacattctagattttttaaggaataaaataattataatcatataaaaactgcatcaaaaaaaccatcagtaacagttagatgatttttttcatgcagtttctttgctgtttgttaatattgttaacaatatgtacatttttaaattaaatttattttgttatcgtattcaaatattaggtaaatgttttcaaaagaccacaataaaaaacgcaacccttggggctaggttgcgctttagcaataagcaataagcaataaataaaaagggggctatatattccttttatttatccttgcaagaatattatagggtattattattaataatgcaagtgatttaataaaaaatgtgaatatttttgaaagaaatgaattattttattgcaaaattatttaatattcgttaatagctctttaaaaggcttaattcttcatctgttaattctctatattcgccttcttctaaatctggatctaataataacccaccgaactcttctcgtttaagataagttaccttttttccaacagcttcaaacattctttttacttggtggaatttaccttcttgaattgtaagccttatttcagatccatcgttactgctcgataatatctcaagattagcttctaaacatttatacccatcatctaaagtaattccatccttaaatgcttttatatctttttcatcaacgcttttatctattttagcataatatactttatcaacatgccatttaggtgaaatcaatctatggtttaattcaccatcattagttaataacaataatccaacagtatctttatccaatctaccaatagggaatgggttgaaaacctgatgttctaggtttaataaatcaataacggtttcatctctattatcatgggtagctgatagaactccatctggtttattcatcattagatatatgtatttacgatatagtacctcttcaccattaatttttataacagatttttcagggtcaacaagcatggcgctatcttttacaactaagccatcaacttctataattcctttttttgcaaaagatttaacatcttttctgcttccgtatcctaaattagaaattattttatctaatctttccaaattattcactccaatcgtttgtttgctttaatttatacattgatttattgtaccataataataaatatcttaacacatggatatataacttgtaatttatctacttcatttttatttttaataaaactagtaggatttatacaaattataatatttataaaagaaaaccatgcataaatgaaattatttcatatgcatggctttctttcaatagatttatatccactgtacaatagaatttaatggctgtcttgttttttcatgtggttctttagcgcggtatccaaagctagccataactgaaacaccaaagtgttcagtatctaaaataccttcattcttaagaatttcttctactttctcaatattaaatccttcaattgggcatgaatcaatttttaagaaggctgcagcagttagcatgtttgctagagcaatgtacgtttgtttacttgcccagtcaaaaattgcacgatcactttcaagtaaattgaaatcattcttctcaaagctttcgaaagctgattttctttgattggccacatcttcaggaagattttgaacttcagacataatcttagttatatattcagaattataaattgtatcaacttttttacgagcaagaagaattacaaagtgactagccccattaaagctattctgagctccccaagatacaggaaataatttttctttaagagatttattttgaactacaaggaacttccaaggttcaaaaccgaatgaacttggagaaaggcgcccagcttctaatatagtattaaaatcttcttcagatactgtttttgtagggtcaaattgcttacaagcatgacgaaattgaaatgcatctataatttctttgtttttgttattcatttaaaaaccacctcttatctaagtataagttaagtctaacacaattggatactgcattgaagtacgcacaaatttgatatataatataaatgaacttacctaagtatctattttatactaaaggagctaaaaatatgcatgaacaagttatatatccagattgtcctaaccatccatgcccagtagagacaacactaaatataattagtggtaagtggaaggggattattttatatcgtttattaggtggcaagaaacgatttaatgaattaaagaaattgattccaaatgttacacacagaacattaacacttcaattgcgtgaacttgaaagagataaaatattaaaacgtacagtttatgcggaagttcctccgagagttgaatatgagttgacggttcttggtcagtctatgtcacccataattaaatctatgtatgattggggcctgaattatcaatcagaattaaagtcttaaaaaagaaataaaatatttaattagcgttttaatgagaataaaaatttaagactatattaaaataataaaataaaaaaagcattgacaaaaaaatattaaaattctataattaattcgtacccgaacgaacgaggtggtaaaaatgaaaaacaaatgtatcgttggaagaatgagtataattgttgaagcgtccaacaaatttttgacaaaaaaaataaaggatgagcgactacctatattgcaaaatcacgcagcactatttgatatcttacctgaagatggttcgaagttactttttaatgaaatagcaagcacatggaaaatatcaaaatcatctttgtctgacataataaataagtatgagagtcaggggttgataaataagtgcatgtgtagcgaagataagagaagtgtatatataagtttaactcctgaagctgtagttataaagcaaagacttcaagttatggagagagaatttctagatataatattaaaagattttggtgaagatgaaaaaaaggtctttgaagataatatagataaagctcttaaaaatataataaaaatgctctaaaggcattttttttaaatagataattcgtacgcgtacgaagaatataaaagaaggagtatagattatgaaagaattaataatgaaatcactagataaaattagaccaatgctacaaagagacggaggagacgttgaattagtggatgtgagcaacgatggagttgtaagtgtaaaaatgcaaggggcttgtggaaattgtccaggagcaatgatgacaataaaaatgattattgagcaaaaattaaaagaagaggttcctggagttacagaagtcataggagtgtaaaaccaaagagtttaataagttaatgtaaataaaatgtttttaaagttggcatatacttcgtacgcgaacgaagtatatgctgaaaagattcgtttcgggtactaaatgaaatataaaaaacatatagaaattataattaagatattaaggtagatactaaaatattagggaggggtaatatgtttaattcaataagaaaaagattaatctttaattttgttttaatagcagcaataataactttaatttgtataactttcttttcataccaaatggtaaatggaatacaaaaccaaatgaaagcagatggaattattttagttaataatataaaagcaaatatagaaagtgtaggagttacaaatacagataaaatacagggaataatagatcaaacatataaatattcagatggagaattatgctacataggtgtaatatcaagtgataaaactcttgttgcaggaacatcgaaggaatcaattggagagaagattgattcaacaggattagatgcagtatttaaaggtaatacaggagcatatatgtacgaatggaaggggactcctgcatataatgtaacagttcctgtcaaagacggagatgatataggatacgctctttcaatcggaatttctgttgataacatgcaaaagtctattagaagcactattataaaaagtataatttatgccatagtattattgatattagcagctgttgcaggagtatgtataggaaggcgaattgcgaaacctatagaaattattaaagatgttattgaaaaagcagggaatggagattttacagcagaatataaaattacaggtaaagacgaaataggaaaattagcagctgcaagtagtaaaactagaaagagcatgagggagcttgttaggaaaacaaaagtgatatcagaaagtttggctaaactatcaaaggatattgaaattggcggtagcactgtagcatcatctagtgaagaaatcgcaacttcagtgactaatgtatctcaagaaggtataaaacaagcggaagcgttagaagaggctgttagcttattagaaagtttttcggtagatttagataatgtggataataaattgaaattattagctgatggtggaaaagttataaaagaggatacaaataaaggcgtagaaactataaataagctagcgaacactatcgatgatatgttaaactcattttcagtatcaagagcaaaggttgaaaatttagatagcactatatcgcagattaattccatagttgatgttataaatggagttgcaaaacaaactaatcttttagcattaaatgcatccattgaggcagcaagagcaggggaggctggaaaaggattttcagtagtggcagaagaaatacgaaagcttgcagaagaagtattaaattcatcaaaaagcataactcaattaatagatacagttatgaaagagactcatgatgtttctaatactacagaggctgtaactaaaatagtaaaagaaagtaaaaatgatattaataccgtaacaaactcatttgaaggagttattagcaaagttaataatattcctagtgatattaatatggttcatgtggtacttcaagaaactatgaaaggaagaaataagatcttaaatacagttgaaaatatagcttcaaaatcgcaagaaatatcagccctttcagaagaggttacagcagctacagaagagcaagcagctataacaaatgaattttctatgacagcaaaaaaactagttaatatttcatcggtattagaaaaagacatcttaaattttagaatatagttccttatattgttgaattataaaagttagagtgattaatatatgatgattaaaattattaaattactaagtaatgcgtgagtaacacttgattaaaatatcaagtgttttttattcctaaaaatttataattttgctaagtagatacagactaacctagaatataagtttgaatatatgcaattaaaataatattttagttaggttaatgatttaaacataagcacatatggtataatatttaaggattgggaaaggaggaataagtaaatggatttaaaatcattacttaataaagaacaatatgaaggggcaactacaattgatgggcaggtacttattttagctggagctggttcaggtaaaacaagagttttgacacatagaatggcacatatgattgaagatttagatattgcaccttacagtatattagctattacttttacaaataaggcagcaaaggaaatgaaggatagagttaaggcacttattggtgaaagagcagaaaatatgtggatatccactttccattcaacttgtgttaggatactaagaagagagatagataagataggctacaagagcagttttactatatacgatagctcagatcaaaagacattagttaaagagtgcatgaaaacacttaatattaatgataaagatataacagaacaagagataatgggaaagataggaaaagctaaagatagaatgcaaagtgttagaagctttatgttagaaaatgaagctaactttagggaaaagaaaattgcagatgtttatgaaatgtaccaaaagagattaaaagaaaacaacgcgttggattttgatgatttaattttcaaaacagttgagcttttcaaaaataatcctgaagtattggagttttatcaaaataaatttaaatatatcatggttgatgagtatcaggatactaatggtgctcaatatgagttggttaaattacttgcttcaaaatataagaacatatgtgttgttggagatgacgatcagtgtatttatcagtggagaggcgcggatattcaaaacatattagattttgagaaagattatccaggagctaaagtaattaagttagaacaaaattatagatcaaaaggaaacatactaagtgcagctaatgtagtaattgttaataatgcaaatagaaaaagtaaagtattaaggacagaacaagagccaggaaataaaattaaaatatatagggcctatgctgatagtgatgagggagattttgttggtaaacaaatcttagatataaagaataaagaagataaaaattataatgactttgctatactatatagaacaaatgctcagtcgagaatttttgaagaaagctttagaaggaaaggaatcccttacaaaatagtaggaggcacaagattctatgacagaaaagagataaaagatgtattagcatatttaaaagttattgttaatcctcaagatgatattagtattaggagaataataaatgtacctaagaggagcattggtgatgcaactgttgcaaaggttcaagaatttgcaagcagctttgagtttgatttatgggacgcattagctgaagtaaggagcattccaacattaacgtcaagaaatgtttcaacaattgaaccttttgttgcgctaatggaaaatttcatggaactcagtgagacagtacctgtttcagtgcttattgaatcaatattaaaagatactggatatctaaaacaattacaagaatcaaatgaaattgaagacaagagtagaattgaaaatttaaaggaacttgtttcagatgcagctgattttgaaaagaacaacgaagacaaatcgttatctgcatatttggaaagagtttctctagttcaggataccgataagattgaagaggaagatgatgcggtagtattaatgacaatccatagtgcaaaggggttggagttccctgttgtatttatggttggtatggaaaatggtatttttccagggaatgcgtcatttgaaaaagaatcagagatggaagagtcaagaagattgtgttatgttggtataactagagcaaaacaaacattgtttatgacttctgcagaagttaggcgagtatttggtaaaactgtagcatatcctcaatctgactttattaatgaaataaagccagacttaaaagaatatgttggagttaaaaaggaaagtgctaagagcagggagaagcttatgcaaagtaattcctacactaacccacacagtttaagaaatagtgttacaggtaatagagcatatactcttaacaatggtggtattaataatgtaattgatagaagtactatgaatgaaatggctaaagaatatatatctgttagtgaagcgactcttggaagaaaagtaattcacgaaaaatttggaaaaggaacaattgttgcagttcaggattcaggtaacgataagaaattaacagttgcgttcgataaacaaggtgttaagtcattattattatcttttgcaaaacttaaaatgatttagtggaaatttggaggctaatatggataagattgaaagaataaaagaacttgttgaaaagttaaatagatattcatatgaatattattctttagatagtccatctgtaagcgataaggactatgatgaaaaatactacgagcttcaagcgttagaaagagaaacaggatatgtacttccttattcgcctacattaagagttggggatgtagtgctagaaggatttaggaagtatacacataaagcaaggctttggagcttagataaagcgcaaagtttgcaagaaattatagattggcataatagaaatgttaagtttgtagaagaggctaggggaagaggagaaaatctgcctgatctaaagtatgttattacaaagaaattcgatgggttaacaattaacttaacatataatactgaaggtatacttgaaatagctgcaacaagaggaaccggaagtgttggtgaagaagttacagcgcaggtcaaaacaataaaatcaattccacttaaaatcaatagcaatgatattttagaagttcatggagaagctattatgacgcaagaagcgtttaataaatataatgagacttctgatgcaccactaaagaacttaagaaatggggctgcaggtgctttaagaaacttaaatgtaaaagaaactgcaagaaggaatctttcggctttcttttatgatgtaggctataaagaaggaactccatttaagacttatatggaaatgatggagtttataaaacagcaagggcttccagttgatgattatataagggtatgtacgtctatagaagaaattgagaaagagatagattatgtaagagatattagatttgatttaaattatgatatagatggattagtaattgcaatagatgatattagaacaagagaattgataggatatacagtaaagttccctaagtgggctattgcatataaatttgaagcacaagaagcaacaactaaacttttagatgttgaatggaatgttggaagaagtggtagagttgggccgacagcaatattagagccagtggaacttgcaggcgttactgttaaaagggcgactttaaataatatggatgatattgcgagaaaaggcgttaggataggtgcagaagtcttcgtaagaaggagtaacgatgttataccagagataatggggatagtaccagaatctttaggaggttctgaggaaataacagttccagaagtttgtcctgcttgtggcagtcatttagtgctaaatggggctcattatttttgtgaaaacactttgtcttgtaagcctcaattagttaaaactatagttcattatgcttcaagagaagcaatgaatatagctggtttttcagaaagaacagcggaacaattatttgaaaaacttaatattaaatctatttctgatttgtataaactgaaagaagaggatttaataggattagaaaagtttgcagctaagaaagcacaaaatcttctggaagctatcgaaaaaagtaaagattgtgagttatacgcatttatatatgccttaggaattccaaatgtaggagtaaagactgcaaaagatttagttagcagatttaaatctatagaaggcttgaaaaatgcaacctttgaagaacttgttggagttcaggatgtcggagatatagttgctcaaggagttgtggctttctttaaagaggaaaaggtcttacaaacaattgaagaattattagctttaggtgtcagtcctaaatatgaagaaaaagaagtgatagcaagtccttttgaaggaaagactgttgttgcaactggttcacttaagaattattctagaactgagataaaagataaacttgaaagcttaggagcaaaggttgcaggaagtgttagtaaaaaaacggattatgtaatagcaggagaagctgcagggtcaaaattaaccaaagcagaggaattaggagtaaagatcctttcagaagatgagtttgaagaaatgctaaggaggtagagtatgaaaaaattaataaatttgcttgaatttatatcagcttttataacaagcatcttaataatttgtacttttttgacaacatatcaattttattatgttggccagatttttaattcatacttaccgatacaacttggagtctgtatcactatggcaattttagcaattaggtttcttattaacgagacaggaaaaaagagaatagtatattgtatcttaagctttttaatatcaatttctttaattttctttatgataaatttaattaagtaataaaatattgattaaaatcaacttagcagctgttgatttgcgtcagaagtttttaattaagaaactgactcaaagttatttcaaaacatttgagtcagttttttgattagataaagtaaattgtggaaataattcttaatataaattaaggcaaagggtgtaattatgaaaagaatttttttctatgcaattatgttaagttttataatattattttgtttaggatttgtgaacaaagaaagtaacaatgcatctagtgatgattcgcaagaaacaataagttatggtataaatgagattccagaagacttagaaaaggttactaatttatctaaacgccatgaggatattatatgtgcagtaagtaaagggctggtttctaaagatgtggataataaaatagtaccatctttggcaagtgaaattacaaaaagcaaggatggcattcaatatgagtttaaaattagagatgatattttttggagtgacggaagtaaaataactcccaatgatatagctactttctttaaagagctactgaaagaagaagatgaagaaaatatacaagcattgcttaatgtttatggagcgaaagaattcagagatggaaaagttgtatatgaaactggagttgcaataaaaggaaatgagaattctgttatcattagattgaataaagcggatgataatttcttaaatgaattgaccaaaccacagtatacactaagaaaatatttaataatgtggcgtaatatgaaaaatagttatagtacattaatttactctggtgattataagattgattcatttaacaaagatcaggtcgtcttaaaaaggaatgagaataataataaaagtggtatagatactattaaaatattaaatgatgatagtgtagaaacatctatggcatcatatgaagtaaaagaaagggatattgtaataaatccaccagaaagcgaacttaataaattatcagagcagaaaaaattaataacacttcccgaaacaaaaggaacatatttagtcattaacagtaaaagtaactctattcctcttcaaggaagaagagatatttataatgatgtacgtaaagctacagaatcgtatcaaaattcaaataataaagaatttgaacttgcagaaggaagtttttttagggaggataaacaggatctaacaaaattgcaagcaaggaaagttattagcaataaagaaggtgaatggaacaaacctaagatattaacattactatgtgaagatactgatgagaatagaatcttatgtagaacaatcgaagactggtttaaaaataatacaaatataacaataaaatatagtttagtaaaagaagaattcgaagatgaagaattgaaaaaaagatatgatatgattttggttaataataatgccaattcatctgacaaaacagatttttatagtaactttaaaaaatatctaactgaagaccagaataaattgttggaaaagttattaagcactaagaatagtggagattattcaagtttagaagaaaatctatttgataactacgatattcttccgttggtgttttataatgaaaatatagcaatttctgataagatatcagatctaaaattagatggaaatggtaatataaattttgctacaatccagtaggaatagtcttatggctaagattaataattgtctagagcatatattttcaatacaacgtattataactatccttatatgtaaatcttatattttgatttacatataaggatagttttttgtaatatccatatctatgaatcttaaaactttttcttactgtgtggatgttgtgctttatttttctttagttttttatttttaacagaatgattaattttactcgtactatcattacttaatgaggctatattagtattttttttgaaagtattaaaactattgagtacaggttgtttaaagttaatagggtcttctgattttgataagtttaattgtgtctttaagttacttacagtactctctggactagatgtagcggatggattattagagttatcttcttttgtgtcagttgtcgcagaatcagtatttgcgtcaacagagttatctaaatcagagagtctttctaatcctaatggcgggataaattccataaagtcttcaaccatatctttaagaagatagattatcataaagaagttgaacatatttttgctactatcaaaagaagtccttttagtatttaatgaatcttttttctttgaataacttaagttcttaacaaatacaggagctaaacctgtgcttttaggagtaggtaatactggcattctaaaatatatttcatctaacatatcatcagaacgtaggcttaatttcttatatcgttctacctcatctaaggttggagcttcaggccaactcgttaaaagaccgccgtttacgaagaattttctataaagaccagaaataataggtcgtagttctgaaattctatcttcctgaaatgaatacataagtaaacataaaagatatagattaatttcaatgcaagagtatttactatctttcttatcagacaattttataaatatatttttatctgtatcatataaactaatcagtttttcagtaatttctttagagaattctttaaaagaaattatttctgtatgtttataagcttccattaggcagatagaaaataatgcacaatcatctatagaatcgatatagtaatctttttcttggaatttagaaatcaaaaagtcacccaagtctaaaattaattctttcgcattttgtgagcacgaatatttataatgaatatttagagcgagaaaaatttgtatacattcactaaacgataaatcatataatacagaattataagttttaaacatatctagaatttcgtttgaaaatgcagcataatctttgctaagttcatcactatcattataatatgagtatagtaagtaagcatccatcataaaagcttgatctgaaaatttaaatttatcatctttatctattagagaaaatcctttagaatttccatcagatatatttttcttatctacaaataagccttcattatttcgtaagttttcagaatagaattgtaactgctctctagcaaggtatttaaatggtttctcaagagatactatatttctttttccatcactataatgtgaataatattcgcttaattcaagtaaacataaagtcataagagcactagtagaagggcttatttcctttttaaaacttgcttcatcaaaactagggctgcttttactatgaataaataacggtgaagcttttctatataagcataatagtggagaaaaattatttaatatgctaatatcttctataggagatttttttgaagctctagtttgagctaaaattccgcacttagagtttagaaccaaagtttttattgattctttggataagtaaaaaagttgaccactaatttctttttgggaaagactgttcatcctaaaaaatggtcctatatatctcaatgtataacacctctcataaaattctcatcttattcattaatatgaaatttgtaaacaaaaagtacataaaataaaaataaaaggagattttttataatgaaggaaggaaaattagatttcgaggatttgagaaatattatattaaataataaaacaattaagagaaaggaggtaaagattagaaatgatgttggagaagattgctctattattgattttggagaatatgaaggcatattttctacagatccaataacaggagcaagtgagaatgttgggaagctagcagtacatattaattgtaatgatatagcatcagcaggtggagagcctataggtattttagttacaatattagcgccaacatcatcaacattacaagagataaacgaaatcatgaaggaaattaatgaagaagcagctaagattaatgtagagattatagggggacatacagaagtaacaagtgcagtaaataagatggttatatcggtaacagtaataggaaagaatttaaaaggtaaatcggtaaaaactgcaggagcgcaattaggagatgacataatagtaactaaaacattaggattagaaggtacatatatcttaataaatgatcataaagcaagaattgagaaaattttatcaaaagaagagatagaatttggaagtaatttaattaataagctaagtgttcttagagagggaaaaataagcggagaatttggcgttaattcaatgcacgatataacagaaggaggacttcttggaggactttttgaggttgctattgcatcaaataaaggctttaaaatatttaaagagaaaataccaatgttggatataactaaaaaggtttgcagggaatttaaaatagatccacttaggctcatatcgtctggaagtatgcttattactactaaaaatggtagtgaattgataaaccttctaaatgaaagtggaattgaggctagtataataggtaagatatgtgagcgtggatcattattaatagataatgatagtgaaatagaggttgaaccacctaaaagagatgaattatttaatatacagtaagaatgctaaaagattaatgtgttcaagtaaattagttagaattatataaaagctatttaggaatatatagtgttagttaggttacttaaaaatgaaaaagtgataatattattagtgatagaaaagcaaaagaaccagtgattttaaagcactttatagagtaattatggaatttgaaatttttattgtaaatgagcaaaaggagatatataatgaaaaaattaatattagctagtaataataagaaaaagattaaagaaatgaaagaaatattaaaagagatagatatagaagttagatcattggaagatgagagtataaacatagatgtagttgaagatggaaaaacatttgaagagaatgcaaaaaagaaagcaaaggaaatatatgaatatctgttagaaagaaaagatagtaattttattgtattagcagatgattcaggattagaagtaaattacttaaatggggagcctggaatttattctgctagatatgcaggggaacatggaaatgattcaaaaaacaatgaaaagcttttaaacaagttaaaaggagttttaaaaagcaatagaggagctaagtttatttgccaattagctatgtttacagataatggggagtattttaaagttacgggtgaagtggaaggatatattatagaagaactacatggagatggcggatttggatatgatccattatttttctacgaaccattagataaaacttttgctgagttaacttcagaggagaagaatgaaataagtcatagaggaaaggcattaaaggaattaaaaaaggtaattattaaattaatttaatttatttagaaagttattctagatggataggttctttgctatataagagttaaataaataataatgcaggaggagaaattaaattatgttaattgcagttgtaagtgatacacataggatgactaaatatattaatttggctaaggcactaataaaggatgccgatattttgatacatctaggagataacattgatgatgcggaattattggaaaatacttttaaaggaaaagtatatgctgttgcaggtaattgcgattattcaactaagtatccaaaggaatctgtcatagaagtgaatggaaaaaagatattttttacacatggtgatctgtatggggtaaagagttctatgaataatatctattataggggaagagaattaaatgctgacattgtgttattcggtcatacacatcaacaattagtagagaaagaagatgatatgatattaatgaatccaggaagcatatcattacctaaatttaaagggaggtgtataggttttataaacatagataataatggggaagtagacgcatatttaaaagaaattagggaataatgattaaatatttaaatttattatgaaaaattataaaaaaggtattgacgaaacagatttgatattgtagaataatcattgtcgctgagagatgagtgacaagttgaaaaactagttaagattctcggggtgtggcgcagatgggagcgcgcgtggtttgggaccatgaggtcgcaggttcaatccctgtcaccccgaccatttaaagattaatatttgcgggtatcgtatatcggtaatactccagccttccaagctggaaaggtgggttcgattcccactacccgctccattaaaaattatgatattaatcaaagtggttaaaaaagtcttgacaaagtttaaaggaacatgtaaaataaaaaacgttccgaagaaaaagttcttgacaagattgcttgaatagagtaaaataaaaaagtctgaaaagcaattaaatatgcgtttttagctcagctggatagagcaacgcccttctaaggcgtgggccaggggttcgaatcccttaaaacgcaccattaaatcggggtgtggcgcagatgggagcgcgcgtggtttgggaccatgaggtcgcaggttcaatccctgtcaccccgaccatttaaaaataaatatgcgggtatcgtatatcggtaatactccagccttccaagctggaaaggtgggttcgattcccactacccgctccatacaaatttaatatttgtaacataataaaagatatgcgtttttagctcagctggatagagcaacgcccttctaaggcgtgggccaggggttcgaatcccttaaaacgcaccattatggtgaacgtagttcagttggtagagcgccagtttgtggcactggttgtcgtgggttcgagtcccatcgttcaccccatacagggatatcgccaagcggtaaggcaatggactttgactccattattcgtaggttcaaatcctgctatccctgccattattttggttcactagctcagtcggtagagcacatgacttttaatcatggtgtcccgggttcgattcccgggtgagccaccaaattcataaaaacttatgcaggtgtggcggaattggcagacgcactagacttaggatctagcgcctaacggtgtaagagttcgactctcttcatctgcaccaaatgagcggaaatgactcaacggtagagtgccaccttgccaaggtggaggctgcgggttcgaatcccgttttccgctccatacatgaaataatataaataaatatgcgggtatcgtatatcggtaatactccagccttccaagctggaaaggtgggttcgattcccactacccgctccaattatgcgtgattagctcagttggtagagcacctgactcttaatcagggtgtccagggttcgaatccctgatgacgcaccaatagtaaacttattatttacttaaaaacttgggataacatatagttcattccattacagggatatcgccaagcggtaaggcaatggactttgactccattattcgtaggttcaaatcctgctatccctgccattatttggttcactagctcagtcggtagagcacatgacttttaatcatggtgtcccgggttcgattcccgggtgagccaccaattgtatatgcagatgtggcggaattggcagacgcactagacttaggatctagcgccttacggtgtgggggttcgactcccttcatctgcaccaaatgagcggaaatgactcaacggtagagtgccaccttgccaaggtggaggctgcgggttcgaatcccgttttccgctccatacatgaaataatataaataaatacgcgggtatcgtatatcggtaatactccagccttccaagctggaaaggtgggttcgattcccactacccgctccaaaaaacaactgatttcagttgtttttatttatataaaaatgaatatgcacttgtagttcagttggatagagcgttggacttcgaatccagaagtcgtgggttcaaatcccaccaagtgtaccataagaatagtaataccaacagtttagatatatactaaattgttggcattattctttttcccacacttttcccacattagacagtgcttaagatatcaatagttttatccttatgttttttcaatacatgggtataagtatcagcggtcatatttatggtgctatgtcccaataatttagaaacagtttttagaggaatatcattttcgaattgcttagtagcataagtatgtcttagacaatgtatatgtttgtattcaacaccaattctttttaagaatctagaaaaggatcttgctaaattgctatcatctaataactcaccaatctcattacaaaatattaaatcattatctctataactgtctccagcttttgatttttgaatttcttgttgctcttttatcttattaaatatgtcaatcaaactaactggaagtggaatatcacgctcactattataagtttttgtagtttgaatagtaggtgaataatgctttttcatattctcatcataggttgcaatagtcttagctgaacgacgaatatgtatctctttattatcaaagtctatatcattccatttaaggcctatgcattctccacgacgtattccagtagaaacacatgttaatgctataaatttgattagagagtcttctgaagcatttaaaattaattttatctcattatcattaaatacctcaattttctttttctcttttcttaaattgccaggtatttttattttatttgcaagacaaggatttttaattatataatcttgtaaaacggcatagttaaagaatgaacgtaataatttatttagattaaatattgtagagctacttttcccttttttcttaagtgaattataatatttttgaatatcagtaggatgtacgtcattaagcttaagaaatgatagagtagtgtcctcaatataatttttataaataccataatacctatcaaatgtggatggttttgtggactgttttactacatcaattaaccaactgttgatagttttgcctaagtaaagtttatcaaaatctttggagatgccagaattaattttatttaagtaatcatcacgtttttcttcagcgtctgatttagaattgccatagaattcctttcttattagcttaccgttagaattgcgtccaagagtaattgcaagcctataatactttttgccatttttaacacaattggtttttactgccataatatcaccctttctccgaatgtatgttcttattagtgcctaaaattaaccagcatatacactggattactatttacattattatttaaatttattcaggtgttcgtgaggaacacatttatttgaagttaaatttatatttaatcagttcaatattaactgcataaaaacaagctaattgatgtatagaacaattttctagatatattttgtcaattttattttcatcaattagtaattcagcagcaaattgatttgcttctatttcgaatttaccgcgcttacataacgtatgatcatgtaaaaagaatgccgaattagatgaatgcattttagcatgtcccagttcatgtgccagaaccatatctaaatcaaaatcatcaataattctagtcatatttactataatatattttcgtctcaatacctttttaaatatacctttaggtgaactaggggataagtatttatataaaatttcaataccttctcccttagctatggtatatggatttctacttttgtatttttttacgaggcttcgaaccttctttctataatcaaccatacgaacctaccacctattatttttttcttttatttttagttttagcatcccaaaataattcagacattaaatcaagcatttctttttttgcttcctcattaaattcatcattcataaagaaagcttcattagcttttttcaatgtctaggaaagtataaaaattccgaacgctgaaagcgacttgtagacttgtattgagaagctatatgtggtaaattgatgaaatgattaagagtaaattaagaagaatattagaagaaaattggaacgaattttataaaaaatatagaaatagaataagacctaatgtcattgcagaaataaaaaaagttatgaaatgcaaagatataaataatggctatattgaattaaaatgtcatgattgtggtgaaataaagaaagttggttttacatgtaaaagtagattctgtacatcatgcggtaagatttatgttgataattgggttaacggaatgctaggaaaattaataaatgtaaagcataggcacatggtgtttacaattccggaggagcttagaaattattttggaagagaaagagatagattgaggttacttccgcaatgtgcagctaaagctgttacgagttggatgagtgatcaaaataaaaaagaagaatttatccctggaattatatcagtgatacatacttttggccgggatttaaagtggaatcctcatgtacatatgatggttacagaaggtggaaagggaaaagtaacgatatggagaaattttaaatatttttcatatgaagcattacgaaagagatggcaaaaaatattactagatgcaataataaaaagagaaggaaataaagatagttttagacgattaaagaacaagatatataaaaataataaagaaggattttatgttcatgctaaaaatgaaataaaatcggcaaagatagcagcaaaatatatagggagatatgttggccgtcctgcgatagcagaatcaagaatacttgcgtatgatggtaaaagagtaacctttaaatataaaagacacgaggataacaaagaagtaatagaaaaagtgcccgtgtttgagtttataaaaaaagtcataatacatataccagacaaaaactttaaaatggtgagatactttgggctatattcaaggagaagtaaggataaagatcaatttattaagatgatagataaaaaaaatagtacaaattaaaaaatccatagaaaggtgggaatataggattcttgcctcttttggtgtagatccgtgtaaatgtcctaaatgtggaagtaaaatgaaatttaacgatatagtgtatccacgatacggctcgatgcgagaatattttaaaaagaaatttataaatgaaggtaaagaaaagttagaaaatattctggaaatatatgcaattgcaaaaggagttctatatggtaaaataaagccgacaacaacatagttggagggatactaagtgaaagacattgtatcatataaatgtttaaaatgtggaataacagaaaatatacctagggaggttgtagaatactttgatgagatggatcaaagtaacatagatgaaccgccttgtttttcatgcgaaaaatgtggcggtactatgagaccaaaagaatacgatggggtatatgggaaaaaatataagttgtgataagagaaccatagagaaaatgcaatctctatggtttttgctttaattattaaaaatttctccgaaggagcgtggcgcagccactttgttctattaaattcatttaacatatctttttctaaatttttaaactgttcatttactcttttatgttgtatacagtaataagcaatattagcacaaattaaagctagcataaataatataaattctatcatatttcacctcttttttattatataattgacaaagttaccagataatatacaattatcttatagaaatgtaggggggataaatattatgaaaaaaatagcaagtgttttattatgctgcttattcacatttggattaataggatgtggtaataaggcagctgacacatcaaaggaaaatgttaaagagcaatacgctgataaggactttattagtagtttatcaaagggattagaagcaagatggaatttgaatgataaagacgaacaggcacaaaagtcaagtggtaaaccaatacaaaatggaagtgacgaacagaaaaaagaattcatatcatatgcggatgctgaacttacagaaatcgataaatataaaaacgaaaaatttgaagatagtaaattacaagaaaaggcaataaaatatataaatttaactaatgatcaaaaatcagcatgtgattatataacagttgattttaataaatataagcaattatattatacagcttacaatgagaggtcacagttacttattgattttgtgaataattatggattaacagcaagtgaaaaacatagtcaaatattaaaagaccttgtacttaaaggaaacgaaatcactaaagctgaagataataaaaatgcagtcaaaacaatgacagatgctattaaatttgaaaaagttgataattcatctagttggaaaaaatatcaggcaattgttgaaaatactactgatattgattttacttattatgatttaagtataaatttattagataaggatggggttattgtagacactgaacatgcaaatgtatcaaactggggaaaaggacagaaagctaaatttgagtttagctccaataaggaatttacttcaacgtcaatagtcgcagattacaatagtaaataaatgccataatttttaattaaatgttttaatatagttggagtaaaaattcctacattattatatgtgaaatattaaaatgtatggtattaggctttttagatgtattcataattatatgtataactaacttgcaactaacaaagtaaatctgaattgttgatttaacaagatttcaaattctcaaagagataattagtataagttttaataatatagtgtcaaagttcatgaaatttaatgctaatatatctaaaaagagtaacattaaatagaaatatataatttaggagattaagcttaatatggatacagataaagaaaaattaaaaagtatgtttgaagattttaaagaaaatgtattgaaaaacataaaagaggcaatagattcgagtaattttccattagaatttcttatgtattatgatgatgtatgtttaagagatgagcttattaaagaaattgaaagaatgggggggaaaaaacatagatattctcatagtagatataaacatttagtaattacaatctttgaaattataattagagatatattaaaagacaagaagctagatgatgtaaaaatagataataccattgtgaaaaataatattgaaattatacataaaaatatagacatgcttatggactattatcatgtctatattgctaaaaatgcagctcaatctaatagatataacgtaaaaatagatggaaataaatatgagttcactaataaggagttcaatttagagtataatatacaaggttattatgaaaagaacaatatatttcaatataaaggtgatccttattttgaatattgttttggaaagccaataagtagtgaatgtataaaaagaatatatgagtggtttgtgagtaatctagatactttagaggaaagtgatgacttgggaaagtattcagtttctgaatttttatatgtatggagtgtaatttattttgcagcatctactaactgtgtctttaagaatatcagaacatctcaagcattaaaagaatatcttgatgctacagctgtagatataaaaacagcatttgagagtatatttgatttcataaagaattcaatagatggtagagaaaatgtgcatacgctaataggatacttaggatataatgattttttagatatgatactaaaggcaacaaacttaaaaaaagaaactgtagaagatataatttctgatttaatatataacggaggcgatgctaagtatactttaatgcagtatccagtacttaaaatggaagataagattataatgccttcatactatattttaaatgaatgtcatgcagaaatgctcatgaaaagaaaaagtaaattattatatgatagcacatatacaaaagttcacaagaatgtgatagagcctagattatgcttaaaactaaaagacgctttagattttaataaaaattttaaaatcatatgtagctcggaaacaattaaagacactaatagcactaatcaatcacagatagatatctttatttatgatgaacggaataaagatattatgataattgaagtgaaagatcatattgctaaactggataatgttgaagtaattaatcaggtgaattttgaaaaaaacgcaacaagcaaaggagctatacaacaactagaaaatcaagagaagctaatcaaaattcaaagaaatttaagcttatttctagaagatgtaaaaattgaagatataaataatatatatttaggatactgcgaaacctactatttgggaactccgaggttcattagtgatttagaaaataagaaaattgcatatatgccatataagttgctaactaaaatgagcaagtggtcttcagtaaaaaaaatgtattattattttttaaaagctagatacctaaatgataagagtgattatatatatcatgaagaaaaaattaaaagatttggatatgagataaaaatacctatgtatgagaataagcaataaaagctaaatatgttgaatagatagaataagaatttataatcccacacttttcccacaaaagttataaatttatataatatgagaagatattatataaattaagaagttagatttataaacaatgtaaaccaatataaagtgtgataaattataaaaaaactaatccagaagtcgtgggttcgaatcccaccaagtgtaccaaacatgaggaataccagcggtttaaagaaatttagagcgttggtatttttgtttcagccaaacaaaatagatttaccaatgattacggatgctaacggtcaatatatagtacctccaagagtattagataattacacaatatcagaaagtaatagcatagcagataatcaagcattagtttatcatagagaatgtatgctattaggggttaataaggatatacaaatggaatggggttatacgcaagacggattccaaagaatgataaaggcgttaagaatttatataaggtgcgacttaggaatagtaaatgaaaagggtataagcttagttacttcaacaaattaatattatattaatcggtgtatgggttatccataacaccttttttttatttacctgccgtggtcattgctcatgtggctttcataagaaagatcaatataaaaggcaattacaagcatatagggaaggtatcaatgaataattatgtaatttacactatcatttagataaatatggatggtatacataaataagtatataattaaagtatgttattcatatatttgtgaggtgtaatagtgatatgaaaaataaaattaaatttaaacatatattaattgtgctattgctagtaattatattttttttcgttgtagataagattgtagtacacgaatttatgagaagttctatagtgaaacaataaatttttaatccccccctattttgggggattttttattgaatggactgacaccacacagcccccatttagacgcacaattttccctaaatgaaattttaataatacatgtcttacaaaatgtgttagaatttatattaagtaaaaattatttgtataacatacagataaattataatttgatgagatgatggaggcgtggataaatggttttattagttatagatacacaaaaattactagttaatagtgaattatatagttttgaaaatttagttaagaatatcaggaaattaattgatacagcaagagaaaataacatagaagtagtgtatgttatacatgatgacggagtagaaaatgatttaactaaaggtaaagatggatttgaagtttatgaagattttaagcctatggaacacgaaaaggtgtttataaaaaatgtgaatagtgcatttagaggaactggtttgttagaatatttaagaatgaatgatgaaaaagatataattattgttgggcttcaaacagataaatgcattgatgctaccataaagtgtggttttgaacatggatttaatatgattgtaccaagttatactaattcaacagttaataatgatttcatgaatggagagcaaagttataagtattacaatgaatttatgtggagtaataggtatgctgaatgtatttctatcgataaagtaattgaaatcataaagagttaaaattccaatttgagggcgagttataaatagtaatttgtagagaagatttataaatttgaaaggagaaacgaatggataaaatattaacatttgattgttatggaacactgattaatacaaagccaatttctgatacaatatcaaatattgcaaaaatgaatggattgaattcgaaagacgctgtaaatatttatgtaaattatgaagataggcttatgtatggtgaaccatatattccttatgataaattgataaagcaagttttggaatattgtgatatggaattgaatagtgatatttttggcaaatcttatgatgaaattatttcagtgcataaagaattaaaacctttcaaagaagtaatagaaacgcttaaagaaatacataaaaaaggataccaacttgctcttatgtcaaattctgtgcatgatattatgaattatcacttagatgtattaggtaatgtatttgataatgtttttcttgcagaggatattcatgcatataaaccacagcttaagttttttaaatatgttgaagaaaaattagaattgaaaggaaaagagcattgtcatattgccaagggatattggtgggatatagtaccttgttcaaaattaggatggcgtaaaatatgggtgaatcgtaattataaaaaaggtaacaagtgccaagaaccatatcaagaagtgcatactcttgatgaagtgctaaacctaatatgaaatttaacaaaattccaatttgtcacaaatagtagaaacataatttagaatacaatttttaaactgtatatcaatccaaaacacattattctaaatgaatgatgtgttttttttatgctcaaaatcaaagaaaggagggcgggagcatttggcaagaccaagcaaaagcgttgcggttatgagtaaaaatcttgtgaaagtaattctaaaaattcattttacagattttttgtatgtaattgagggcgttgtggtgtagcaatttttataaaattttataagaaatatgggggagtattacaacaataggttaactttcttattaaccaaagttaagtttttgatttaaaatttaacctataaaaatcgttgatattacatgcttaaaactatattaggttaaaaaggttaatattttttttttattaatttgaaatagaagaagaaatatatattaaataattaataaagtgatttaggttgtgctacaaccatgactacaaccaataggataaaattaatagaacaatgacaatttattatagacaatgaaatgagcaaacaagagggattaagactatatcaatatataagtagaccggatggcattgaatccagaagtcgtaggttcgaattctaccatatgctcttttaagatgtatgaactttaaacaaaaggacttagcaaaaatgattctaacaccaacaatagttttcttgttatttggaagtatattaggattaataattggcaccattgggtcttttataatataaatgtagataaaatgaaaagattaagaagtatgaataaaaacaattttaactattttgagtttgtactatttttataaaagggaattgcaggaaactaatgtttcctgcaatatatttaaataaatttagggaattgtttaaaagagaattatatatttattacagtattaaatatttaatctaaattagagctccacttgaagataatctatatccaccaactgtagtattatatgccatagcaccacttgagtatagataataccaagtaccattaacgtttatccagccagtggccatagcgccagaagattgtaagtaataccaagtaccgttaatgttctgccatccagtagccatagcgccagaagattgtaagtagtaccaagcaccattaatattttgccatccagtactcatagcgccagaagattgtaagtaataccaagtaccattatcattcatccatccagtagccatagcgccagaaggttgtaagtagtaccaagtaccgttaatattttgccatccagtagccattataccgtcagcttttaagaaataccaagatcctccgacattggcccaattattagcaaccttagttccacttgcatcatagaaattccaatctccgtttgatagtttatcccaaccaactttcgctggggtaactattgaagatgcatcatcttgtgattgttttttaccttcctgaacagttgtgtaggcatcgccatcgtattcccaagcaattaagttctcatcgttatatacatctaatctatcgaaagatctatcacatgtatacatagtcttaaaatcgcctagttttgtagatttttttatttctccgttatatatagcccaaacatttccattaacatctattgaccatgctttggcttttgtatcctgatcttcatctttcttggcaacatgtccatctactttagtatccaacttactattttcattgtatctatttaatttttcgctagtttttaaaactattttttctgtttttactttatctccgccatcgtcagaataagttacgtaaatagcaccatcaactattgtcgcgactgcattatcagaatttgttataattttttctatagcagtataagcatcttttacatcaccattacctgtagcaccggaaatttcatatgaatctgtgcttttcggtaagtaggcatccttttctttatatccttgagttttagaaattttttgtatataatataatgtgtctccggctgagttataatcgcttccattataggttgtactgtcggggccgctcgttttaagaatcttatgaatagaaccacttacatttgctttaactattctatatatatatttatcatcttctcctagagtagatataggaacaatactatttaaagttatcccttcttcggtatcaccaacatgttctatttttaccatttttgttccattataaacatatatattagcatcgtaagaggcgtcgatataagttccagaagtatttgtatagccataataaactgcttgtggtgtagtagtttgagtgctcatgtagttttcagcaacggttattgcttgagaggttgttgctgaatattcgaaccatacatcaccaaatctgtttgcattgacttgtgcgccgatttttacttcgccgtatgaaccaccttttccgaaatctgaacctgtactctttgcatatctgtcagtttttttcaatttatttattaatttagttccggcagtttcagttgaatcacttacagtatcatcatctgaaatttttcctgttgataaatccactagatactcgtcactgccatcaaatgcttggacaaatttatcgtcatattttactcctaatgaagtggcatcatctaatctcttgtctttagttcctgcattatagtacaaaccattatcatcatcatcggttctgtatccttcataaatgtatttaccgtctttaaatgctacagcattttcaattgtaccatcttttgttcctaacttatctgcggccattgcaggcattattgataaaatagatgcagctgctactagtagagctgttattttacttgttctttttaacatgatattcctccttttaatataaaaaataatattagttaaatataaattaaaataaatttgaaattaaagaaatatttaacttattcaacatattatacaaacaaatgatgaatattttggtactttttataaaaaaatatcgaaaacaatataatatcatatatatttttatctggttttagatatctctttatatattatataatacaaaagagttatccaaacttggtactttttttatattttggttaaataactttaaaaattaaaaagaaaggtatagagagtaaacaattgcagaatgtatagatatatgctgacaagtcttaaattaagaataataaatgctaagctaaataaggaattttttattaataaagaataatcgtaattaatacatgatctttaagaaatggatgttatatttgataattttttgcatagttttacattacatagtaatatgttaaaaggaagtaatgattaagaaatttaaaaattaatcagtttaatttaacttgtaagttaggaagactttcgcaccttcaatagcgaagagaagcttctgaagattagtttcttgagagattaatttaaaacgaagtgtataaactaaattttaatgagagcataagcaacttattttttatgaataatatgtagtaggtgagaaaatgaataaaaaaggagtaataatatttattgttttaagcatgattacatttgctttttatgcttataacattaacgtagagtcaagaggatttattaatgagatgattaataaaatagaaggaaaaacattaaattcaaaatttcaaacaaaaattaaatctgggaatttatcaactgactataatatagatcaagtgcttaaagatatagataaattgcagttaaatactttaaatgttccggtagttataaatatagatagtagaacttctagtaatatgacaatagataaaggaagtgaaaagagggctattgaattatttgaaaaattaagatggaagaaaataaacataatattagaaccgtatccatggattgaaaacggaagtataggagaaacagaatggaaaccagataatatagatgaattttttaataactggactaataatgttttgggaaatttaattaaagatatagccataccgtatcatgttgacgcattaaacatagggactagttttgtgtatatggaatctagtgagcagaaaatgtgtgatatggttgattatgttagagatcgctacaaaggtttattaacttatagaacaaatttttgggttacagcgaaagatttttcatcagaatttacagataagtataatgaaaaattaaataataaaatattttcaaaggtagatttcatttctatagcatcttattttgaacttacttctaatgatactaatactgtagaaaatttaataagttcattagagcgtacccaaatatatgatagaaaacaaaatataaagcaggaagtaaaaaacttctatgataaatggaataagccgattttctttggagaattaggttttccgagaactaataaggcttctgttcaaccacataatccgttgatctctaatattgtaaataataaggaacaggcaaattgctttgaagcatatagaagtgtctttgaaaatgaatcttggaatcttggattctctatatttgcaataggtgaaactagtgacgataagaagtattatccaagtgaggaaagtgctgaaatcataagaaaatggtatacaaaaaatgaaagctaataaaggatatacttagagaaagattagtaaaagtgtatatgggttataacttataaagtttatagtgtataaaattgctatgtagaatatgatattcataagatattttatgataagtatttttttagagcctatatataactttgagaaaaaattataaggcttttagggctttcttatagtagtgaatgcatttacatatttatgtataagtagtaaaataaagaatggtgagagaattaaagaaatctaaagataatttcattgaaaaacgtttacggggaggtacacattgtgagtacaggaggaattagaaggctttcaaaatctatcaaatttgagttgttgatagaatggagctttttttttatttttatgggatttctgatcattataaataactatagtaatttattttttcatactggaattgagttatttattaattttatttttgcattagtatttgtatttgcttttaacacctacagaatcaataagaataacttcttattaatattaggaattgggtacttttttgtagcagtactagggatatttcatatgcttacttatactggaatgccttttttaactaatatagatggattaaagatagcaacccaattctggattgcttcaagatatatgggtgcttttacatgtttgattgcaataatattcaaagtgagcccacaaaggaatgttaatccttacgtattgttcatcgcttatttttgcataacaatatttttgatatcgtcaatatgcatatttaagttttttccagattgttatgtagaaaatgtggggttgacctccttcaaaatagttagtgaatatgtattatgtactgcatttttaataattgctgctgtattttttatattcgaaaaaaatattgatagatatttatttgtatgttttgaatgctttctcatattatctggagtatgtgaaatgttttttgtaagttatgtagttccctcagaatttactactataataggacatactataatgattcttgctgcatattttttatacaaaggagttgtagagacaggacttagaaagccttataatcttatgaatagtgatttatatatggctgataataaagtgaaattatttgaagaaataatatttaataatgaagaatgtcttaatatgataataaacaactcagacaatgcgatatttgttattagtaataataagtttatatttgcgaacaagaaaatggctgaacttttgggagcggaaaaggttgaagaaataataggtatagatattgagaagataattacagatgaagttaaaaatgcagtttatagaagaatagataatgctatatccaataaattaagtacaccatttgttgaaagtaagttattgagacttgatggtaaacaagtggatattgaagttacaaatagtttttgtatgtataaaggacaaccttcggctatggttatgcttagggatattacctcaagaaaacaaatacaacttttggaaaacaatattgaggaaaataaaaaattgataagtaaaactacggaactaaataagatgatgacagaattcttttctaatatatcccatgagcttaaaacaccattgaatgtacttttgggggctgttcagatcttatcattgtcaggcaatgatgaaaataagttagaatcaggtaaatacttaaaaacaatgaaacaaaattgttataggcttgtaagacttgtaaataatcttattgatatatcaaaatttgattctggatactttaaaatgaatcttcagaactacaatgttgtaagtgttattgaagatataacattatcagttgcagattatgcaaataataaggggattgacttaatatttgatacggatgtagaagaaaaggatatggcaatcgacttggataaaattgaaaggataatgctaaacctattatctaatgctattaaatttactgatagaggaggacagatattggttaatatgtatgataaaaaagataatattgtaatatctgttaaagacaatggagttggaatgcctaaggataaactgaatattatttttgaaagatttggtcaggtagataaaactcttgcacgtaatagtcaaggtagtggtatagggctatctcttgtaaaatcaattgtagatatgcataatggtgatattaaagcctttagcgaatttggaaaaggcagcgagtttgtggttaagctacctgttaaatttgttgaagataagcaatcctctgatggacgtttatatgaaagtaaagtagaaaagataagcattgagttttctgatatatattattaaattttcataatgatgtgtagagtacaacatgtaagtggtgataaatattaataatattgatttagtattataaagtaaatgggggatatataatggaagtttttatttataggacttatgatgagtggtttgatgataaacccactgagaccttggagggcgaggtgaattctatatacaatggagttttagttattgatacattggaagacttcaaaaagtataggcaaatactttcgttaagaaataactttgctattgtttataaactttcatatggttttttatcgtatgctaaagaaatcaatatttattcaaattttaattcttggcaaaactctaatccggaaattactattatgggagaagtatgtgaaagtgaatctacagatagtcacttagtcttcataactcaagagggatttaaacagtgcatatctttatatggaatttatgcagtaacatatgaaaggtaggattatatgcatctacaagatatagatttaagaaaggtgtatagaatatggaaatcaaacttaggaccatttcaagggttcttcagaagtacaccatttgtttcacttcaaacctatgataattttatgttgaaagaagaaaatacatgccaatgtaataaaaatgtattggatatagtagtagaaaattgtagtaagaataatttttttatagttgatttatctattgatgagattctaaatttagcatttatattaaacaatgaatattctataaaaccaattctaaacgttaatttattatttcatccgtttggaataataggaacaaaagagaatattaataaattgataaataatggtttgaatttaaaggaagtaagcactgaaaagtttgttatgctgataccgtatgatagatataatgatgattttaagattgatgatttaaaagataaattgaataatcaatatggaataaatgatgatgatcttccaaatacggatatgctaaaaattcttggctacactaaaataactattttgactatgaataagattaaagatgacttacgggattatataaatttcataaatgaggatatagaagtagaagtgataaaggtgagggtataatgaaagatttcaagcagatagtaaagaaaaataagagaaaagcattatctatagcggtagctgctgcattttttgtaagtggacctcttgggtttacaggttgttacaaccctcaaaaggaagacgatgaagaccaagatggaaatggttctagctatagtggcggtgggcatattggaggatggaacagttttagtggtggttcatctataaataatgattcttctggcaagagcaaagctagcatatcagattcatcagttggtaaatcatcaggatactctggatcaaagggaggaagctcatcaagttagtgcaagtgataagataattaaaattttaattatcttaccatttatgtgaagaaattatttaggatgtggattactctatggaaaaacagattaattatactgaagatgttttatttaataactatatggtgagttctttaggcgaagagtatgttcactcgcaaataccgttttattttgataaatcaacttatgaaaaaatggtgttttatagtgaagaaataaatagaatttcattaaatatacttaagaacattaaggaaggacatagtgaattattgaattattttgatgatttcatgtttaaagaaaaaatatttaacttgaaatgtccaatgtctccaatgttttgggccagatatgacacttttagggatgttgatggggatatttattttgctgaatttaattatgataaaccttgcggtcaaaaagaaattcatttatcaggtaaatgtagttttgatgggaatataaatgttagttttataaataatgtgattaaagaattactaaaaatatgtaaagaacatgcaatggagaaagaaaaaatagatgtaggatttttgatggatccgtgtcattatgaagaattacatcacagttactactttaaacatattttgaaagatactaatattaacatagtacaagtcggacctaataatttatctgtaagagatggatatgtttatgcatattctaattttaagcttaagataattttgagattgtttcctacagagttttttaatgaaatttctaatataaatgaaatattgaattgtgttgattgtggaaatctattgttaattaacgatcctagagtaattgctattcaggcgaagggtttttttgcttatttatggaatctggttaaatctgattcaaagcttctttcaattagtgataaagaaataattaaaaagtgtattccgtatacagaaatactaaatcatgatgatatacaagatgtaatagataataaggacagctatgttgttaaatcgtcattaggtagatatagtcaggaggtttacataggtaagctttatacacaagaaatgtgggaaaagaaaattaaaattgtatctgaaagcaataaaatacatgtaaaacagaagttaataaatattagacaagaatatacttatgcgcctgggaataataatatgaatattccagttttggcttttggaaactttggtatttatataatggattataaagtagagggacttttggttagatggagtagagatcttctaactaatgatgattacgcgtggatgtgcccaataggagttgaaaatttcccggtttatataagggaatttaatcataaaaatagaaaagaaatttggaatgaaataatagatgaaagtgtatttaaatataatttcacaggagcttatacaaatatttatgaatacatatcattgaactcactaattttaaaagaatgtgcctataaagaaatgctttcagtaagtagtaagttttgtgagattttaaaaagaatatatccatatatacaaaaggaaatagaacttttcggtcctatactaggtataccagaagaactctataaattagtttcaaattcatgcactatatcactttgtgcattaggaagaattgattttgctattgataatgatggaagtttgaaaattttagaatttaattctgaaacacctgcaggtttagttgaagcaattggattaaattctataattaaagaaaaacttaatatccaatatcaaaaccctaatgtcaatcttaaggatgatataaaaaaatcattttttcatatattagaagaactcaagaaaataaaaagagttaaaaatattgctgttgtaacgtcttggtattatgaggatatatatacaagcaatttaatagctgaaatattaaaggaattgaatgagtatagtgtagtttttggaaatatatatgatttgaaagtaaataacaataaaatttatctctatgggaatgaaattgatgcaatttataggcattatccattagattggttttcttatgaagatgaaatgaaaaaactaattgatcctttgagttcgggacagtacttgataaatcctgggcatacacttataactcaatcaaaggctttatttgcagttatttatgagcttgtcagaaaaaagttcttttcacgtgatgatgaggagtttattttgaaatatataccatatacatgtttagagcctgataagattctttcttttgattatgtaatcaagccatatctttcaagggaaggagcaggtgttatgttaagttatgatgaaatgagtaaagaattagatgatatagtgtttcaagatagaataaatattaaaccgttatattcaaatgtttattcaacaatggaagaagaaagcaaatatttgtttcctgtaataggtacatatataacaggtgatataccatcaggagtatttactagaatgggagattttataacagataaaaatgcaatgtgtgttgctacatacattgagtgttaatataagctttaaatttgattagtgtaatattaaaaatatacaattatagaagaatatgagctaaggctaattatttaaataataataaggaggagagatttatgactggtattctaaacaatattgcagttagtattatttttggattgataggtattatactgctgattttcggatactgcttttttgataaagtattaactaagattgattttaatcaagaattaaaagaaaaaaatgttgcagttgctatagttatagctggttttatgatttctataggaattataatttcaggagtcgtatcttaaaaataatatatttacgaagaataataattcagaaaccatcttgaaataaatggatatttcaagatgtttttttttgtttattttaaaaacatgaattatttatagcaataaattaaataatagtattaggataactttaggtgaaacgattggaatcgttattaaatagataattacaattaaaatactaaggaggagagagacgtatgagaaaaattacacttaagaaaattacatcaataatattagtattatttttaagtatatcaacttcattaaataatactccgtatagttcagaatttaatataataagtgttctaaacagtaatagtatagaatcatatagtgatgctagaatagaggatgatttttataatgcagtaaataaggaatggttatcaaaggtaaagcttgaggatggatacatttcctatggaacatttgaggaagtatgtgggagagttaatggagatattcttaatataatatcagatatacaaaaaaataaagacaattatgataagaatagcgatgagttaaaagttttaaacttatataacaactatctagatatgaaaaaaagagatgaattagggacaaaacccttagagaaatatatgaatcaaatagatgaaattaaggatacgaatgatcttaaatccatattgaaggatgatgaattctcatattttcaacctctaataaacttaggtgtcggtccagactataagaatagtaacattaatgctttgtatgtttctagaagtaatcttggattaggaaattcgttttactataaggatactagtgataagagtcaaaaaataaaacagatatatatagattatatagctaaactacatatgctatatggagaaaatgaagatgtagcaaagaaaaatgcagaaactttttttaatattgagaatgaacttgctaaaaagataccttcttatgaagaggaagctaaagatgaaaaccgaatacaaaattcttataatctatatacagtaaaagaattaaataagttaatacctaatgcagatatacctggattattaaataaattaaatattaatagtccaaaaaaaataatagtggaaaacccagaagaattaaaattagtaaattcacttattagtgaagataatctggaagatataaaaacttattttaaaacaaatgtattaataaacacagataattacttaacatcgaaacatagagaggcatgtaatgaactaagaaaagtgctttatggagtagagtgctccgaattagatgaaggttcaggggtgaagtttgttagtggacaattgaatgagattataagcaagctgtatgtaaataaacattttgatgaggaatcgaagaatgatgtggaaaagatgtcaaaagagataattgaaaattttgaagatagattacaaagcaatacttggatgagtaaatcaacaaaagagaaagcactcagaaaattggaaaatgtcaatgttaaagtgggttatcctgaaaagtggaatgactatagcgatgtagtaataaattcttatggcgaagggggatcattagttgataacttaataagtatatatacatctcaaagtaaaaaacagttttctaagttaaatcatgaagttgataaaaatgaatggaacatgggaccttgtactgtaaatgcctactataatgctttaaataatgaaattgtatttccagcaggaatattacaagcgccattttatgataaaaatgcaaaaaaagaaaaaaaccttggcggaattggagttgttattgggcacgaacttacccatgcattcgataatacaggcgctcaatttgatgaaactggtaaattaaaaaattggtggaatcaaaatgattataaggaatttacaaacaggagtaaaagggtagtagattattattctaatataaagacgggtaatgaaaaaaatgtaaatggaatcttaaccgtaggagaaaacataagtgatttaggcgggatggcttgtgttttagatattgcaaaaaaaatggaagatcctaacctaaaggatttatttgaaaactacgcaacagtatggagagaaatatcaacgaatgaattaaaagagtatttattaaacaacgatccacatgcgcctaaaaaggtcagagtaaatgcagttttatctcaatttgaggatttttataaaacttacaatataaaagaaggagataaaatgtatgtaagaccagaagatagagttggaatatggtaaagaaaaaataaaaactgaatattggaattatgacatagcggcactaattaatatgaataaatagaaaaatgaagttaaacatatccatgcgtgtcgctgtgttaataaatgagtaataaaaagaaaaaaagagaaaataaagaatatttatcttaaaatagtgcaaaataaaacataagtaataaatatgatgatataataggttttgttgtcacgagagttgatgaaaaatgctagaaattaaaaaaaagtgttgacattgatgtgaggtggtgataaactaaatgagttgcttgaaggcaacaagatctttgaaaattgaacagaataagataaatatatttaagtaaaccagcaattctttatttgagtaagctaagattaaactttttattgagagtttgatcctggctcaggacgaacgctggcggcgtgcttaacacatgcaagtcgagcgatgaagctccttcgggagtggattagcggcggacgggtgagtaacacgtgggtaacctgcctcatagaggggaatagcctttcgaaaggaagattaataccgcataagattgtagtgccgcatggcatagcaattaaaggagtaatccgctatgagatggacccgcgtcgcattagctagttggtgaggtaacggctcaccaaggcgacgatgcgtagccgacctgagagggtgatcggccacattgggactgagacacggcccagactcctacgggaggcagcagtggggaatattgcacaatgggggaaaccctgatgcagcaacgccgcgtgagtgatgacggtcttcggattgtaaagctctgtcttcagggacgataatgacggtacctgaggaggaagccacggctaactacgtgccagcagccgcggtaatacgtaggtggcaagcgttgtccggatttactgggcgtaaagggagcgtaggtggatatttaagtgggatgtgaaatactcgggcttaacctgggtgctgcattccaaactggatatctagagtgcaggagaggaaagtagaattcctagtgtagcggtgaaatgcgtagagattaggaagaataccagtggcgaaggcgactttctggactgtaactgacactgaggctcgaaagcgtggggagcaaacaggattagataccctggtagtccacgccgtaaacgatgaatactaggtgtaggggttgtcatgacctctgtgccgccgctaacgcattaagtattccgcctggggagtacggtcgcaagattaaaactcaaaggaattgacgggggcccgcacaagcagcggagcatgtggtttaattcgaagcaacgcgaagaaccttacctagacttgacatctcctgaattacccttaatcggggaagcccttcggggcaggaagacaggtggtgcatggttgtcgtcagctcgtgtcgtgagatgttgggttaagtcccgcaacgagcgcaacccttattgttagttgctaccatttagttgagcactctagcgagactgcccgggttaaccgggaggaaggtggggatgacgtcaaatcatcatgccccttatgtctagggctacacacgtgctacaatggctggtacagagagatgctaaaccgtgaggtggagccaaactttaaaaccagtctcagttcggattgtaggctgaaactcgcctacatgaagctggagttgctagtaatcgcgaatcagaatgtcgcggtgaatacgttcccgggccttgtacacaccgcccgtcacaccatgagagttggcaatacccaaagttcgtgagctaacgcgcaagcggggcagcgacctaaggtagggtcagcgattggggtgaagtcgtaacaaggtagccgtaggagaacctgcggctggatcacctcctttctatggagaaatctagatcagcatgatgtctgactagtacaaatacatcattgatgtattaaaatataaaatacttgctcaaaggttacttaagtatttgttctgttcaattttgagggattttccttcagaataagggcttatagctcagctggttagagcgcacgcctgataagcgtgaggtcgatggttcgagtccatttaagcccaccaatgttctttgaaaattgcatataataaatgtatataaaatacaacaaagccaagaataaatattctttgtgatatgactaataattaggtcaagctacaaagggcgcatggtgaatgccttggcatcaggagccgatgaaggacgcgataagctgcgataagcttcgggtaggcgcacatagccagagatccgaagatttccgaatgaggaaactcacatgggaaaccccatgtatcataaagtgaatacatagctttatgaaggtatacccagggaactgaaacatctaagtacctggaggaagagaaagaaaaatcgattttcttagtagcggcgagcgaaaaggaaagagcccaaaccagagatttatctctggggttgcggacagaacataacgagaaatcatagttaattgaacacaactggaaagttggaccacagtgggtaatagtcccgtaagtgaaaactatgataatcagttctgcaccagagtaccacgagacacgtgaaaccttgtgggaagcagggaggaccacctcccaaggctaaatactacctgatgaccgatagtgaagcagtaccgtgagggaaaggtgaaaagaaccccgggaggggagtgaaatagaacctgaaaccatgtgcctacaaccgatcagagcaccttatgtgtgtgatgatgtgctttttgtagaacgagccaacgagttacggtatgtagcgaggttaagtacttaaggtacggagccgaagggaaaccgagtcttaatagggcgactagttgcatgctgtagacccgaaaccgggtgacctatccatggccaggttgaagcgagggtaaaacctcgtggaggaccgaaccacgttgctgttgaaaaagcatgggatgagctgtggatagcggagaaattccaatcgaactcggatatagctggttctcctcgaaatagctttagggctagcgtcggaaaatgtgagtagtggaggtagagcactgaataggctagggggcatagcgcttaccgaaccttatcaaactccgaatgccacatactatcagtccggcagtcagactatgaaagataagttccatggtcaaaagggaaacagcccagatcgtcagctaaggtcccaaagtgtaagttaagtggaaaaggatgtgggatttctaagacaactaggatgttggcttagaagcagccactcattaaaagagtgcgtaatagctcactagtcaagagatcctgcgccgaaaatgtccggggctcaaacttaccaccgaagctacgggttcacgttttacgtgagcggtagaggagcgtcgtaatcgggctgaagtcgtaccgtaaggagcggtggactgattacgagtgagaatgttggcattagtagcgagatgtaggcgagaatcctacaggccgaatatctaaggtttcctgagtaaagtttgtcttctcagggttagtcgggacctaaggcgaggccgaaaggcgtagtcgatggacaattggttgatattccaataccactataatcgttattatcgatggtgtgacggagaaggataggatgtgctagctattggatgctagtctaagcgtttagggagttgggattggcaaatccgttccaacaattctgaggcgtgatggggaaggttctacggaaccgaagtatctgattccatgcttccaagaaaagcatctagagagagaagtagtgcccgtaccgcaaaccgacacaggtagatgaggagagaatcctaaggccgacggaagaattgcagttaaggaactaggcaaattgaccccgtaacttcgggagaaggggtgcctgagaaatcaggccgcagagaataggcacaagcaactgtttaacaaaaacacaggtctctgctaaagcgaaagctgatgtataggggctgacgcctgcccggtgctggaaggttaaggggaacacttagcgaaatatcgcgaaggtgtgaacttaagccccagtaaacggcggccgtaactataacggtcctaaggtagcgaaattccttgtcaggtaagttctgacccgcacgaatggcgtaatgacttgtgcactgtctcaactgcaaatccggcgaagttgtagtgcgagtgaagatgctcgctacccgcgattggacggaaagaccccgtagagctttactgtagcttagcattgaatttcggtattgtctgtacaggataggtgggagactgggaaactagggcgtcagccttggtggagtcgttgttgggataccaccctgatagtattgaagttctaactggatgccatgaaactggtgacaggacattgttaggtgggcagtttgactggggcggtcgcctcctaaaatgtaacggaggcgcccaaaggttccctcagaacggtcggaaatcgttcgaagagtgtaaaggcagaagggagcctgactgcgacacctacaagtggagcagggacgaaagtcgggcttagtgatccggtggtacctcgtgggagggccatcgctcaacggataaaagctacctcggggataacaggctgatctcccccaagagttcacatcgacggggaggtttggcacctcgatgtcggctcgtcgcatcctggggctgaagtaggtcccaagggttgggctgttcgcccattaaagcggcacgcgagctgggttcagaacgtcgtgagacagttcggtccctatccgtcgcgggcgtaggaaatttgagaggagctgtccttagtacgagaggaccgggatggactgacctatggtgtaccagttgtttcgccagaagcatagctgggtagctaagtcgggaagggataaacgctgaaagcatctaagtgtgaagcccacctcaagatgagatttcccatagcataagctagtaagaccccttgaagactacaaggttgataggtcagaggtgtaagtgcggcaacgtatttagctgactgatactaataggtcgagggcttgaccaatatagtcaagttgtaatatacattaaaattatatgcaattttgaaagaacattatattctttcaaatgacggtccgcgatagctcaatggtggagcactcggctgttaaccgataggttggaggttcgagtcctcttcgcggagccatatttataataaaagaatttttagtcgagaaatcggcttttttttattgtataaaatagagtaaaaacttatactatatatggatgtgaaagttattaataactaaattagatactacagaataattaataataaaatctattgaaatataagaggtattataatatgagcgatgacattaataatagtaagaattatagtaatgaaaccagtaagattgctgaagtaaaagaagctggtgagacttatgaagttgttaaaaatggtgaaaatagtgagatagatgataattctaaacacaatgaagataattctgaaattaatgatattagtgatattagtgatattagtgatattagtgataatataaggccatttgagattgatgaagttggtgaagaaagtttcgatggtataaaaaagagaaagttcgctatcttacttacgataatagctgtagctataattataggaatcgctattgcagtgcaaaaatctgttacgaataagcaaacagcagaagctcttaatgcaaatggaaatccatattctgaaggagataaaaatcagacagatagtgacgtatataattcagcgagaagctcagaagtagaggatgttgcttttatagagaaatatttaaatcagcagatgaaggggcaaatgcctgatggagctgatggaaagaaagttgtttacttaacatttgacgatggtccgtcagaaactgtgactccaaaagttttggatactcttaaagcagagaatgttcatgctactttttttcttgtgggaaaagcaatagatgaaagtgaaactaataaaaatatagttaaaagagaacttgcagaaggaaatgcaataggtaatcatacttattcacataattatggatatttatatccaaatggaaaaataaatttagaaaattgtatgtctgattttgaaaaaaccaatcaatctttgaaaaatattttaggacaggatttttcaacacgagctgttagattcccaggaggtcaaatgacatgggataagaaggacccatcgggagctgatgcaatggataaggctcttcatgaaaaagactaccatcaaatagattggaattcattgtctcaagatgcagaaggggcacataaaaatgcagagcagttaaaacaggaagttataaaaactgtatcaggaagagaaaaagcaataatattaatgcatgatacttatggaaaagaggaaactgcaaaagcattaccagaaataatcaaatatctaaaacaacaaggatatgaatttaaaattatgaaatagcctaatatgactatgttgattttcatttattttaatttatgtagctaaactttggttacataaattaaaataaatgaaaatcgcatagttttttttatataattggtacaaatattatttttatcaattaattgaaatagaaataattaatgataaactattaatatataattagatttgcatacatggaagcactaaggttataatttataacaataatcttaataatagaatgtatataattataatattactgaaaattatctttatattagaaataaggaggaataagatgttatcaaaaaatattgtagcagaggtattagcaaagtgcttagtaactggtggcgattttgctgagatatttgaagaaaattcaattaataattctatagcattaattgacggcaaagtagatgatgccataggtggaagaagttatggtataggaataagaatattcaagggattgaacagtgtatatgcttatacaaataataatagtttaggcggtcttttagatactgcttatagagcagctttagctttaggtgatgcaaataaaagtgaaataaattcaatagtattaactgagaagagtatatctacaatacatccaatattgtattatcctaaggatgttgcatacgatagaaaaatagcaattttaaaaagttcttataatgcagcaaagaattataatagtgatatttctcaagttattacaagttatgcagataaagagcaaaatattttaattgcaaatactgaaggtttatatgttcaagatacaagaataagaacaaggttaggcataagtgcaatagcatcaaaaggaagtgaaaaccaaactggatttgaaggacctggaagacatatgggaattgaaatgtttgatagcgttgatccagaatatcacggaaaggaagcagcgagaatagctcatacaatgctttatgcaaagaactgcccagcaggtaatatgactgttgctatagataatgggtttgggggtgttatattccatgaagcttgcggacactctttagaagccagtgctgtagctaaaggaaattcagtttttgctaataaattaggtgagaaaattgcatcaacaaaagtaacagctatagatgatggaactgtacctaatgcttggggatcactaaatatagatgatgagggtaataagacacaaaaaaatattttaattgaaaatggtgttttaaaaggctatatgattgataagttaaatggaagacgtatgaatatggaggctacaggaagttcaagaagacaaagttacaagttccaaccaacttcaagaatgactaatacctatatagcagctggaaatgataatccggatgatatcattaaatctatagaagaaggattatatgcaaagaagctaggaggcggatcggttaatcctgtaactggtgagtttaattttgcagttcaagaagggtacttagttaaaaatggtgtgattcaggagccagtaagaggagcaagtcttattggtaaaggtagtgaagtacttatggatatagatatggtcggaaataatttagatgtagctcaaggtatgtgtggctcatcatcaggaagtattcctaccaatgtaggtcagcctatgattagagtgaagaaaatgactgttggaggtagataaatatggattttgaattatttaaagaagaattatttaaagaagctaagaattcaggctttgaagagtttgaaatatattattctgatgctgaaagtttaagtttaagtatttatgaaggcgaagttgaaaaatataaactaaataatgcctttggtctttcgtttagaggaaaaatcaataacaaaatgggatattcatatactgaaatattagatgaagaagcaataaaaactcttataagaaatgcaaaggaagcggcatttgctatagaaaatgatgatgaacagtttatatatgaaggggataagaaatataaagaattagactgttacaaaaaagatttggataatattaagcctgatgagcttatagctctttctttagaaatggagaaggaatgtaaaaaacaatgtgataaagttgcaagtttccaaggttgtggaattggatatggtaaagctacttatggaataataaattcaaagggacttaatttgaaaaatgaaagaaataatctaagtgcatatgtcgttccaataatacaagataatagtgaaaagtatgatggaacagggtatgttatggctaaaaagatagatgatatagatccaaaaagtttagctaagcaaggtcttgaagaagcgctttcaagaattggtgggaaaagcattccatcaggtaaatataagataattataaataacgaggctatggtatcactgcttggaactttttcaggaatttttaatgcagagcaagcacaaaaagggttatctttgctgaaaggaaaagaaggtgaaattatagcatcagatgtagtgactctaattgatgatcctcacttaaaggatgggcttggaacaacttcatttgatgatgaaggagtagcaactatcaaaaaagagataatatctaaaggaaaattgaatacattattatataatctaaaaactgcgcataaagcaggaattaaatctacaggaaatggattcaagtcttcttatgcatcaatagtaggcgttagtgctacaaatttttatataaatccaggtgataaatcttttgaagaactttgcaatgaagttaaagaaggcgtaataattacagattttgcaggtcttcactctggagctagtgctgtaactggagatttttctttagcagctaaaggatttatgattgaaaatggaaagaagagttttccggtagaacaaattacagtcgcaggaaatttctttacattattgaaagatatagaggaagtaggaagcgacttaaagttcccgatgagtagcataggatgtccgtcagttgttgtgaaagaactttcaatagctggaaaataattttgttattaatttgatagatatgctaaggtaggttaaatagttatgaatgtaatctatatgtatcttttttcttttataatttatagctttctcggatggatatgtgaaactatatattgctctataatcgatagggagtatgtaaatagaggttttttaaaaggaccattttgccctatttatggatcaggtgcacttatagtaattatattactggctccattttcagataatattgtaattttattcttaagtgcaatgatttttacaagcacattagagtatttaacaggttttttgctagaaacaatatttaatcttaaatggtgggattattcaggctataaatttaatataaagggcagagtatgtctattaaattcagtgttatttggccttttatctctagtcacaataaaagttattaatccaattataatagacttagttagtcacatatcattaaaggtttctatgtggatttgtaatatttcaatcttatatttattaacagatgggataattacaacagttaaagttttgaaattaggtggaaaacttaaagaaatgagcgctttatttgatgagataaaagaaaaaactgaaagctataaagtggttctacagcaaaatttaagcagatttgatggcttgatagaacaggaaagtgaaaaagttattcatgcgaaagaacaaattagcaagctaaaagttaaattagaaaatttggttttaaacaataaggctgtgaataaacgaataattaaagcatttccaaatataaagtctttgaagtatcaacattcactagatagattaaaagaagagataaaaaagattaagaaaaagtaaaagagatggtcaaattttatttgatcatctctttactatagttaaaatataattatctaattagaattgtgagcataatttgcacgtatcattttatccgaaagatctaatgattttttataaatatctttttctttatctgttaagttttccccgcctttaagtgttccattagttattactgcaaaagatttatttgtatttaataagtttctacctaaagcagtgttctcgtacttatctttatcgactccaagtaaatataagagtgttggcattacatcaatctcgccattgtacattttatcaaatgtttttccttcatttgtagatggattatagataataaatggaacagtcggatttcctgtatttagataccaatcttctttatgagatagctgtccaatgctatcatcataatatttatgaattcctgtatggtcacccattattgctataatgctattttttagtaatccctctttatctaattgatcaataaaatagcctatttgtttatctgtatagtgaagactttcaaaatatccaccaagtttactttcatttaattcaggatcaagtccaagttctctatacttttcaggaagatcaaatggaccatggcttgtcaatgttacagtttcagcgtagaatggctgctttaattcttttaacataggaacaacttgctcgaagtatcttttgtcacttataccaaggccaatttgttcatcaacattaaatgagtagtaatcagtaaatttatcaaaacctattccaagtaatccatttttataattccaaaaagaacctttgtcaggatgaatagcagaagtagcatagccttcaccttctaataaatttggtaatgaattataattagtatttggatatctaaagaatgtacttccttgtcttaaaggcaacattgaagtattaaccattaaatcagcatcggagcttgtcccttcgtttacttgctcaaatgtattagggaagtacaatgatttttgtactaatttattcaaattaggtgttatttcttttccattaattgtttttccaataacaaagttttctaaagattcaacttgaatataaatcaaattttttccttttgccattccaaggtattcgttatctggaaggttctctttttttatttcaaataactcatttatatcagccttatcttgatctgttaatttatatggtttagaatctttataaactgtataacagtccataatatgatacccaataggagaaaaatatttagcagtatttgacttatcataattactgaataagtaagcattatgaacatctgtattattgaatacagttatacttataggtacgtaaattataaataatattggcaatacaaaagtacaaaagaatgttttaaatgctcgtttatgtacttgagtaaatgattttctagttatgtaagcatatatgcctagtattataaaatcaaatgcaaatataaaatctaaattgctagtcatagataatatacttccagacatattatctaaattagcagtttgagttaatattaatgcagatggaacagttaaaaaacctctaaaataccagacatcaattaatattaacagcgttaaaagaaaatcgattacgagagtatagattattctacctttacctttaaatagtaatgagaaacttaagaatattaaagtaaaggccatataataatttaagaaagaactagcagattcatagccagtagaaaagctaaatgtatatggatctttgcttgtaacaaatccttgaaatataatcccttttaatactatagagacaaaagctactagaaagaaaattaatcttataaccttatctttttttatattattctttaagctattttttaaaaaattaacaacatatgagttagaagaactcatgatttcacctcaattcaatatatcactacattatagtatacataaatttatggattaaacaaatataaattaatgatatattagtaattaaaaggtaaataatttgtgaataaaaaactatatataaaaattagcatggtatactattaatgtgggaaaacttatataatagacttataataacttaatttaatatatttttaaattaagttatatattagttaagaaatcgattgaaaaatttgatatattaattatagattaaaataattaggtagtgtaaaaaatatatgaaaaatcaatccaactaccatttaatgttaaattatgtttgctagttgcccttgacacacctaaagataaatggtcttaggcagttaaggacgggtgaatgataattttgaacatgactaatagacccgcctattgagatattttaccatttatctttgtgggcgtgtcaagggtgcgtttcaccaactgctttagatcattaggcagttattgtacagttatttagaacaaagtcttgagatagttcaataaatttgcaccatctagtaggcatgttggacattgactctaactcttcaaggattacaggagttttgccttcaagggcagaatgtggtcttagaaagttaaagtatgccacaaacatagttacaaatgcaaccgacccgttaggacttccgaagccagtagtagctctataattgcctttaaaggttcggttaagacgttcaataatttgcttcaatggcctatattcttttgaaacttcatctttattggttaagcctataacttgagtaacatcgaattttatactatggcttgcaaagaagtgctgtgcaagaagatatatagggttaccatcagttataagattaagatcttcaggtatttcttttaacttacttagaacatcatcgatggcttttacagccgtttcggtatctctatgtggtgatactctgtaagatagaataatctttttaacagcatcaaaaaagaagaaaatatagttccacttaccgttaacttttatgtaggtttcatcgccgcagaaagagtcagaaagtttataatcgtagttatctataaatggcttaactacaattgaaacggcattaacatagtttaaaattgcttgatgagatattttaatatcatgaatatctttaagcaatgcagctgtctttctggaagataaaccgtagttaacgtagtaagttagaatgagtcctaaggtgtaagaagaaatcataatgtttggaagagaaacctttgattttaccggactttctttagaaagtggcttaaagtcaaaagtgaaatctctaaatatgtatctaactttgaacttaccaggattcttcttaaaatcttgtttttcagattttgtcattgatttaagattattttggtaaaaagagcaattatcattcttacacttataaacgtagaaatccttacgcgccttgattctttcaagtgttttactgcagtgaggacatcttaacactatggatttctgatagtaatttttaggattgaatgtggtatcacagactttgcaaagatattgtcctcggcctccgttattatcgtaaagataggtatgtggagcaccacacttaggacagataacatccttaggagctaacgctttgtttttgcgaggtttcacaggagcaaattctttgccgtgcttaaactcatattcagctattagaagcttatagttaagtttttcgggaacatcaaagattggttgatcatctacttgaagctttcggtattctttcttaacaggttcgtccgaaatgcttttaagcaagtttttgccaaccagcaaagtcatgagatactttataatttcaataagataaattacagtttcaagaagaaacttattaatcatggtaatagcttgcctccttttttagttcagtgtttttgttttgcaagtataaaatatcttaactttttgggggtggcaagttatttatataaaaaataagaaaaattaaagggttgctgccttagttagataaaaaactttgacagtaccaataattataaaggggtcaaacatatgaaagaaatagattgcagaggattatcgtatctacaaataataagagaagttaagaagtattttaattcaattggagaaggagaagctgttgtagtagtaaacaatgaattagggcggtccaatgttataaggtatgcagcacataaaggatataaagtagatatagaggatgaaaaaaatagatttttaataaagatggaaaagagaggatgcttagaatcagaagatgaggaagaaattttttctatattaataacaagagataaaattggtgagggaaatgatgatttgggaataactctaatgagtgaatatttcgaagcattgaatgagtatgataaacttccaaaagaaattttattcttaaattcaggggttaagttgtttaaatgggattctaaggctatagaagatatacgaatgttatataaaaagggcgttaaacttttaataagtgatacatccttagactattataaattaacagaacaaataacttttggagaaatagcaagcatgtatgatatggtagttgcaatgaagaaagcaaaaaaattaataaagctttaggaattaatagtggaggatattataatgccagattatgaattaattattattggagcaggaatagctggaatgacagctgcacttggagctgcaagagagggaataagaaaaatactaattattgaaaaagagtctaacgtcggaggaataattaatcaatatattcataatggctttggaaaaaactttctagatgagccagtgaccggtcctgagtatattgattttatagagaggcagttaggagaatttgaaatagaaatacttttagatactacagttttagaagtgactgaaagaaaaaaagttacatatgtaaattctagagatggtattaaagatttaaccgctcaagcaataatatttgctatgggagcaaaagaaacatattcaggaaatgttataattcctacaaatggacttacaggaatattcactgtaggagaggctcatagaataattaatttagatggatatctaccaggaagaaggactgtgattatagcgaaaaataaatggggattcatagttgcaagaaggcttatagtagaaggtggaaatatagaagcggttgtcattgagaatacatttgaagaaatggctaattcggaaatacgagatattattgatggctttgatataccggtaatagagaattctagagtaacagaaattgaaggaaaaacgcgaattgagaagctgaaaatagttaatttagagaatgaagaaacaatagaaaaagaatgtgattcgcttctattatcagttaatttcttgccagaaacaaccgtaattaaaaaaacaagctttgatataaattctaagacatctggatttgaagtagtagactttgcaacatctttagaaggtttttttgcttgtggaaatgttatatacggagaaaaagcgttttggatggaagaaactgatggtatacaatgtggaattattgcggctagatttgtaaagaaaagcatgtagaagttagatagaaatatattagcagtaatataataaaagctaaaattactgctaattaattcacagaataatatggtttaaaaataatggagagcattttcatacattaggtgatggccaagtgaattcatgtgaattccatctaaataaatatcatccctattaaatgtcaaatcgtagaaattgataaattgaagattgtatttattagataaattaatgagttcatcctttaaatatggaagttctttttctgcataagaatatagatgcgaaggagaaaaaagcgaatttgccatttggccaataatcttagggggaattcctaaagtcacttttgagcctatatttagtccatcattaatcattatttcaatattactaattataaaaggaattttgcgtccaagaagaagatcattgctacctcccattataaaaatttttgatggagaataaattaaaacatcatcattatagcgagtaagcattgaagtggtagtatcaccattgcaggctttatttaatgatgaaagggagcgttcttgcgtaagtttgtaaacccaagaattttgtttagttaccccatatcctaaagttaggctgtctccaaagaaaatgatatcaagcttattattcatatatagactccttttatgtaattagaatagtttgttaaagcactttttacatattaatgtttttcctgaatcggcttttacataatcatctgaaataatggctttattgcagatactacatataatcatttcgctagacattaatgagttagatgaggttttttttgattttttatcacatttattttcagcattgcaatcaagtttatctttttgataatcagttgcagaactactagttttatcagatagtatattttttcttattggagaatataatttaggttttaaggaagtagttcttttgacaactttatagctaaaatcatattcactttcagcaaagagttctagttcaaatcttggattctctttatcataatattcttctgtaaagattttggttatctgagcatcatttataattaatccacttttttcaatgccatcaaatatactttttgtaatattaatggtatctggatgacgcttttcacttttataatatactcttagtaaagctattagactttcagaaaaaacaatatcaggattttgatttcttgcaagaagtgctatttcctgttcgtatagagcatacctatcatgatattttccagagctatgtggtaggattgcacgtccatttagattgtgtaacttaaaattggattttgtaataggtgatcctttaattataactttagcatagttagacatttaaattctcctcgtgaaagtatatttgttatctcaaatatacatcatatgtaccttttatacaacaagttaatattacaatgaaattgtgagaataagatatatgttaagtgcatttgtatacctagaaaaattgaactttgataatattgtatagataaagtataatattttagtaattaaaatatagaatagtttgtgcattaaaaagatatgatttcataaatattaagaagatattaaacaatatataaatacgagattttatcttttttttaagataaaatagatttagataaattaaataatgctatagtaagtatttaatttatttagttcttaattttaactaatatatcaaagttttttcttgttagattagttaaaattaagttataaataggcttaatcagcttatttagatagataagaataaataattttatttgaattgtaataaaaagaggtattagatatggataaaaaaataattttagcaatagaatcaagttgtgatgaaactgctgctgcagttgttgtgaatggtagagaagttttatcaaatataattgcttcacaaattgatactcataaaaaatttggaggagtggttccagaagttgcgtcgagaatgcatattgaggcagtagatagtgttgtaaaagccgcattattagaagcaggaatttcaatagacgatgttgacgcaataggagttacgtatggaccaggacttgttggggcacttttggttgggcttcaatatgcaaaaggattggcattaggttctaaaaagcctttaattggggttaatcatatacaaggacatattagtgctaattttattgagcataaagatttaaagccaccttttgtctcactagtggtttcaggaggacatacttttattgtgcatgtaaaaggatatagggattttgaggttattggccaaacaagagatgatgcggcaggagaagcttatgataaggtggcaagagcattagaacttggatatccgggcggacccaaaatagataagctagcgaagcaaggaaataaggatgcaatagaatttccaagagctaagtttcaagatgatacattagatttttcttttagtggagttaaatcagctgtgttgaattatttaaataaagcaaaaatgaaagaagaagaggtaaataaagctgatattgcagcgtcatttcaaaatgcgataatagatgtattaaagacgaatttattcttaacttgtgaaagaaaaggaataaaaaagattgcagtagcaggtggtgttgcatcgaattcttgtttaagagaaactttgctagaggaaggtagaaaaaaagggattgaaattctatttccatcacctatattgtgtacagataatgcagcaatggtaggaagtgcagcatatttcaactatcaagagggagcagtatcagatttaaatataaatgcaaaacctaacttaaaactaggggagaggtagagtctaggtatgaagctgttatcacattctaatggagtacataaggttgagaaagataaaaccagcaaaaggagcattttaaaaaaatgtgttatcttttttgtgggattatttatctttggttttttagtgcaaattttaaatgactttgtagataatacaagattaaaatctagatttaagtacgtcagaatagatggacgaaaaatggagtataaacttaagactggtggagattatactgtagtatttgatggatcaatcggaactacaatgtatgagtgggatgatgtttgtaagtcattagaggaaaagaagatatctacctttacatataatagagaaggatatggatttaatgatggtggagacaatagaacaccagaagagcaagcgaaggatttgaaagcactgcttagaaaagctggagcaccagagccatacgttttagttggagaggagtacggtagcctagttcttagtaattttgccaatttatattcggattcagtagcaggagttgtgttaattaacccaatatcagaggaaaatatgcaaactaaggaatttaaggatagtattaaatccaaatattatagaagtatatttgaaaaaatcggtacaaattttagtttgactgcattgctaaataaagcagggctaactatggagaatgatacttttaagaagtatttaaatcagaatgaattagatgaatttcagagctttgaaaataagaaaaattataaacaggcagtttcaaacgagctagaaaacttatataaaggcatttcgaatagtcaaaccaatgaactactaggaaataagccattatatttaataactaataatgaagctgatcctgttaaaaagattggtaatgcaacagtaacaactatatataaagaggaaatagagggatctccaatgtctgtattagatcctaactcagtagttaccggcgttaatagtgttttaaaagatgctaagaaggtagctaaaaaatcttgatgctaataaatatgtatattttcttaaatattaagtattattgaataattaagaaataaagcttctattgggctaaaattcataaaaaattatatcaaattatatattcttgtcatttgtttgacacataataaatctatactaacattataaagataatactagtagatatttaaagtatgctaatatactttatgcgaacaaatttgtatagtttaattactagtcatataagttgagaattgatatataggaggaaaaatacatgaataataatgataataatgaaaaatttattgatgtagaatcattaccagtagataaaggtcagcaagttgcatgggaaaattgttttcaaaatagtaataattatgtagagccgaagagaaagaaaagaagaggtctgcgcatgctaggaaggattgcaggaattttagttcttacaatggtaggaggggcaattggaagtgctgctacttattcattcatgaaaactaataatgttgctgcaactaaacaaataacaagttatattccgcaatcattcacatcaagcactcctgatgcaatgtcagcggcagatgcatttaataaagttgcaccagcagttgtcattgtttccactaaaggttcatctaacagtggatttatgaacggcgaagttgaggggatgggatcaggattcattataaatgaagaaggatatatactaactaactatcacgtaattgcaaatgctaaagaaattacagtaactttaagtaataatactgaggtaagtgcaacagtagtaaattacgatcaagatagagatgttgcaatgcttaagttaaaagacggaactaaagttcctgctgttgcagaacttggagactctgatgaagtatatccaggagctgaggttatagcaattggaacacctctttcaaagaattttgctcagacacttacaaagggagttataagtggaagcaatagaacaatagatgatagtggaaaaagtgtagatttcattcaaacagatgcagctattaatcctggaaatagtggaggtccattagtgaatgctaaagggcaagttataggaataaattctatgaagataggttctgatgcatcgggatcatcaacaccagttgaaggtatagggtttgcaatacctataaatgaagttaaaaataagatagatgctttatcaaaacctatattaaatctaggaatccaaataagagaaattgacagcgctactgctaagaaatacgatttggtagaaggaatatatgtatcttctgttgaagagtattcaccggctgaaaaaggtggtcttaagattggagatataattgttaaatgtgacggaaaagaagctaagaaattcgatgaacttaaggcaataaaggaaagtaagaatgctggagatactatgaagatagaggtaattagagataagaaaactgttgatttatcagttgtattagaagaaaaatctaattaaaatttttctagatggaaattgaatatatttgattattaaaactagaattgataaatataatattatcaattctagtttttattgcatcaaaataatattctttaaaactttaaggaaaagtagtaaaattaaagattataagggtaagatatcttaatttaatagttttttgatatctaaatggagaaggggataaatatatggaggaaataatattaaatataataatgcacagcggggaagcgcgaactttttctatggaagcaattactttagctaaacaaggaaattttgataaagcaaaagggttaataataaaagctgatgaggaattaggatatgcacataattctcaaacaagtttaattcagggagaagccgtaaatgagaaaatagaattctcattgcttttagttcacgctcaagatcacttaatgactacaatggttttgaaggatttagcagttgaattaatagaagtgcatgaaaaaataagttctattaaatagaggtatgtaaatatgaaaaataaaattaaatatgctattgtattttcggttcttttgctaatgggaatagtaagcattaatctatttcaaccaaataaagagcagcaagttagaggaaatatagagctcttagtaaatgagaattcctatgagtacttagttgagtgcgcaaataattttatgaaggagaatgatagaacttcaataagtgtaaaaaagttagaaaattacaatcagatacttaataataattcagaaggaagtacgaaatcaaagatttctagtatagttcagatagataggtttagttttgataaactaaaattagataactatgaatattataataaggatgataagctcttgagcgaatatgctaagaatttttctaagtatagggtagctcaggttaagtatggtgataattccataggaatacctttaacatctaggccattagctttctatgtcagagaagatttattaaaaagttatggatatgaaagagatagtttgaatacatgggatgatatcataagggttggaaaagatattcatgaaaaaagtaacggaaaaatatttataattaatgcaactgatcaagattacgaagatttgatggatttattaaccatggaaacattaagtgatggtgataaaagcatagatgtagttaaatcagaagttcaagctacgatgaaaaaattagaggataataacattttaaacttacaaagtggaggggaattcttagcaagaatatcgtctattaatgccatgaaagaaatagcagcattagatgttccttgtacgtggagcgttaataacgtgcctagccttaaatcaggggctaataagtttttttcatcagaaggcgataatttattgatattaaaccaaaacagcgagaatgataagctaattgaaaaatttataacttacgtaataactaacaataaggaagctgttaaatatgttaaggaaggaaagtttttctcaagctatttatatacttataatactaaagatattgaagagccagtaaaaaattttactgaaaaaagtcctcttgtagtattaagcaatatagaagaaaagactccaagcataagtgattacgacgaatatataaagataaagcaagagattcgagcaaataccaattaataatgaaaatttatataaatagttttagattatcagcattataaggaaaacagtaaggtgtttcttataatgctgaatttattttaatatagtatttgaaatatcactctgaattcacatttgatttattacgagagatttaaataataataaaagtctaagatattaaacttctataggcatttaaggtgttcttggcggtcttattccaagtaaagttaaggcttcttaggtatcccttttcactaagctcagcttttaaagtttcattattcaaaagatcaactaacgcattgtctaattcatctatattatatggatttatcaaaatagcactatcgccagttacttctggaatagaagttatagaagatgttataactggtgccttacagctcattgcttcaagtggaggaagtccaaatccttcatagaaggaagggtatacaaatgcatcacacccgctataaagaacaggaagaatatcatcttctatatagccacaaaagacaactttgtcttgtaaattattttcttgaacaaatgaaagtaacttttcaccctcatcttttaaagggcccccaagcaataacttataaggcttattcaagtctttataaactttacaaaatgatttaattaatcctaaggcatttttccttaaactaaacccacctatatatagtatataaggatcatcaactttaaatgtgttttttacgtatagcttgcattgattcttatctaaaggtttaaaattattattagcggcaagtggagttacaaatattttttcttcaggataaaaactaaagaacttcaatatatctcttttagagtattcagaaactgttagaatgccgcgtgaattagaaattatatttggcatattatttaaaaatcgttctaggtatcctttgccaacagtttcaggcattatatatgggattagatcatggattgtaactatagttggtatttttgtatcaaaatcaaatcctattccgttttgaggaatatggtataggtcagcatggaccttgtttagtgcattaggtatataatatttttcataaaaaccgccatgtctacctgaagaataaattatattaacattttccttgttgaattctttgttaaattttccagagcaaaatagagtgaattcatcattcgaatctaaagaaagaatctctgatataagattactagtataagtaccaattccagttccttgatgtaaagtggaactacgagcatcaatggcaattttcatatgaacacctcaacaaattacatatatagtacagaatattattagtttttaatttttgtgaatataaatcacaataaattatttgagcacatataataaaaataaataatagctggtaggaaaagtttatggagaataataaggagatacttaaaattaaaggctatattgaagaaaattataatttagatgtagaagatattgaaaaagttaaaaatagttataaagttattacaaaggatgagagatattgtttgaaagtagttaaatatgaattctctcatttttattttatcttatctgcaatgaagcatttacaaagaaatggatttggggatatccctgaatttattatgaatagagaaaaaaaagaatatgggaacataaacggaaagtatgcgtacttaacaaaatggattccatcgagagtaagtaattatgataatccaatagaattatcaatggtatcaaatgagcttgcaaaattacatgaatgtagcaaaggctttacattgaagaaagagatgaaaccaaggattggatggttttcatggatagatgtttttgaaacaaggaaaagagaaatcttggattttaaaaatagaataagtcaaaaagcatataaatcaaattttgatttattgtatttggataatatggaaaaagaattaaatagagcagaaaaaagtataacaggtcttcaaaaaaataattatgtaaaggttatggagaaggaagtcttttcaagaggattctgccaccatgactatgcccatcataatatattaatagataataagaaaaatattaatattatagattttgattactgcatattagattcacatctccacgacgtatcttctttattaataagatcaatgaaagatggaaaatgggaaagcgacaaatgcaatctaattttaaatgcctatagtgagagaatagaaataagaaaagaagagctacctataattagagaatttataagatttcctcaggctttctggcaaatagggttgcaggtttattgggaacagcaaccatggggagaagaattttttattaataagttagagaagtacttaaacgattgtgaatttagagaaaagtttattgatagttattttagtgggggaaattaatatggatgaattattgattaatcagtatttaaataaaaaaggaatagctattgttggacaaggttttagttatgataaaaatatgcaaagaaatgatatagtttctcaagttgatttaattatagaatttcataaattattattaggtggcaatctaacgggattaagcaaaattaaaagcacaataggcagagaagtggaatcttataaagtgcagataagaaaactacaaaagaattattcatatgtatctagtaaaacatgtacaaatgagatagagaatatcatattatcaaacggaaaaataatgttggaaaaagctaataaggctataaattatatttatgaacatgactactttggagttataagacgtagtatgaatagagaagaaatctgccttggtaaagttgataaaagtaatttaagaaaaaataatgaaaaaatagaagtgtgtacaataaaaggtatgacatataacttagtagaagaggacttatataattatattaagaaactacaaagaaaggaaattaatatagatgaggaagaactaataaagttatttgtgcatggatcacacttatcatttaacagctttgattatttaagagggctttgtagctatccaaaggatttcttaaagttttgggagaggtatagagatagtagaaaggataatataagagaaatttatgatatgcaaaatggagaatgcaagggtagtaggaaaacaaggaatgacgaacaattattaaatggattgaagaaaagtttaaagtatgaaagtaaaaattttatcatataggtaaccaaaggtagttattgtttatacctaaagcttagttgttaggaggaagaatatgaatagaactaagtattcagaaaaaaattatttatgcgattatgatttgagcctaaagttcttcgaagaactaggaataaaagtaaacgacattgttccacttagaaaagtatttttggtatatacagacgaaggaaataaaatattgaaaagagtaaattatgatgtagatagagtcaatttaataagtgattctttagactatgtaaaaaagagttatgaacatgtaataacatataaaaggttcagagatgatttatgttataaagagtggaatggacaaatttatattgttatggacatattgaatggaagagaagcatcattttctaatccagtagaaattgatctttgtgcagaaaatatagctttaatgcataaagcttcaaaaggattaagagaatatttgaaagataaatacaaaaaagattttttagatatatctttgaaagataaaattaaagaagcatatgatgatttgatttggatgaagagcttagtagatacgtacaaatataaaaatgaatttgataaattatttatgaacaatgtagataagtatttaaatgaaattaaagaggttcaagatgaccttgaaaaaagctcatatgatagcctaagacaggatggggatactattcgtttgtgtcataatgatttagcttatcataatttcttaaccaaaaataatgaaataaatataatagattttgattttatgaccatagatttaagagtaatggatatatggaattttattttgaagtgtataaagaatgccgccttcgatgtagacaagatgtcaacttgcattaatggatatgagaatgtgtcaattctaaaaaaagaagaaaaagaacttttgtatatacttataaagttccctaaagatttctatacaatatcaagagattattatcataagagaaagaactgggaatatgaagtatatttaagcagatttgaaggaaagttgagcaatgatgactttagatatgaatttttaaaagttttaaaaaataaatttttcataggttctgaagtaaagaagtaatttaagtataagtttaatttatttgaatgcaaagaataatataaatctaatttataattgatttatttataataatgattaagccaatattttatttcataaatagaatattggtttcttattagttaaaaaatatggagaatttataaaggcaagaaaatctcttatgattttcttgcctttatatagatatttaataaaaattgattaattgaaactgttgtaatatatatcacttataaggtagctaactacaaaaactatgaaggaattttactagttatataaaaaatataaattttactttatatagttagtgtcttattctatgaatttattatagcttcataggcggctattgtatctagagctgttttattccaagaaaagtttttacttcgtgttaggctttttttgaccattgttaaccttaataagctattacttaaaactctttctatgtcatatgatagtgaatcaatgtcattaggatctataaaaagagctgattcatggcatacttcaggtaatgacgtaacattagaagctattacaggagtaccgcatgccatagcctctataggaggaagtccaaatccttcataaaaagaagggtatacaaggacctcggcagcgttgtaaaataacggcatatcttcaatgggaataaaatcagtaaaaataacgttattagatatatttagatcatcagctctatttttgtatttagtataagaaggacccttacgaccaattataactagtttgaagctttcttttaatttacttgggagtttagaataagcttctattagtcctataatattctttcttggactaaatcctccaacgtaaagtacgaagtcttcctttatcccatatttctcggtaataaagtctttagatctacatttactcattggtctgtaaatatcttcagcagctaatggggtaacataaatcttttcagcaggaaagttaaattccttagcaatatcattcttagagtaattagatacagtaattattccatcacaattatctaaaattttaggcagttcattattaaatatttttaaatatctatcactaacagtttcaggcattcttaaaggaattatatcatgtagagtaataacttttttgcattcaacattttctgatagaccaaccccgttttgtgggacatggtaaagctctatgtctgcattatttaatatattgggaacatttatatcatcccaaaaactattagaaggtattgattcaataagttctgttttaaaattattctttaaatcggttataaagtcgcattgtggtgtgaaaattaaatagttattgctactatcaacattgttgaggctagatattaactgataagtataggtacctataccagtgcctcgataccactttgcagctctaccatctattcctattttcattattaaaccctttcatagcatttgtcttaatctattatattaaaagaatataaaaaatgttaataaaagaaatgatatcctcatataaatatacaggaggtgagaagtatgatgagggaatttgaaattgaaagacaattcaatataaagatagaaaaaataaaggcaaataaaggcgtatactatcttaaaacagataaaggcgagagatgtttgaaaaaaataaattatggaccccaaaagttattgttcgtgtatggtgctaaagagcacttaagaaaaaatggttttaataatttagataaatactatttaaacataaatggagagccttatgcgttggttaatgaagacttatatactttgtctgaatggttagaaggaagggaatgtgacttccataacatagatgaagtaaaaatagcagcaaagactttagctaatctccatgaagcatctaagggatatgatccacctgagaattctaagctcaaaagtgatcttggcagatggcctcatttaatagaaaaaagaattaaatctttagataaaatgagagatatggtaaggaaaaaaagtataaaaagtgattttgatatgctttatttaaagtctatggagttttataaagagatcggaaagaaatccttagtaactttaaatgagtcagattactatgagttatgtgcaattgctgagaatgaaaaaagtttttgccatcatgattttacttatcataatataattttaagcgatagtatggatgtacatgttatagattttgattactgtaaaagagaagttagaacttttgatataagcaattttatgataaaggtgctaaagagagttgagtggaatttagaatttgcgacagctattatagaatcctatgattcagtatcaaaattaaaaccagaggaatataaggtattatatgcatatcttcaattcccacaaagatattggaggcttgcaaatagatattattataatgaagttaattgggggcaaaatacatttgcaggtaagttagaatcaataatacatgagcaagagaaatacctagaatttttagaaaaattcaagaatgaatataagatataataaacataataatatgaactaccgaaataattaaaaattatttcgtgttagttcatttatttttttattctttagaaaattgtaattcggtaaaatctgtggaagaggtactcattgagagtatgaccttttgagcgggttaattaacgtatccaaagtagagcttacgactttgttcttcgctagatagaataaaatcattcttggattaatttagaaacctttaataatctttaccatattataatgtgaaagaatgtattaggagaaagtaatggaaataggagatatagttgttagaaaatcttataataaagatattacttttaaaataattgatattaaagatagtggtggaaagtataatataattctaaaaggaattaatataagaataatagcagatgcaagtttggatgaccttgaaattgctgaagaggacactgggtctcaggataaaatattaaatacaagagttaatgaggccataaagaaagctatgatactaagaggtgatcttagggataaagttgaaaaatctcccaagataaagacgaaaaatgaattgatgtttggaaggccggggaaaattctccatgtagatggggatagtgagtacatggagacttgtctaaaggtatataagcaattatctttagatgcagtggggagagctatagcggaaaaagatcaaccggaagtaatagtagatttagttaaagaagtaaaacctgacatagtagttttaactgggcacgatagtgttttacgagaaccaagggattatttgaatctagataattatagaaattcaagatattatttagagtcggtcaaaaatttaagaaattataattcgagttatgatgaactagtaatatttgcaggggcttgtcaaagttgctatgaaagaatattagacgtaggtgcaaattttgcctcgagtccaaatcgagtattaattcattgccttgatcctgtttttgtatgtgagaagattgcttatacaagaattgataaggtggtttcaataactgatgttattgaaaacacgataacaggaataaagggagttggaggattgcagactaggggaaagtacagagaaggatatcctaaatctccttatatttaataaataatttagatagtaattgcataaaataaatgattaaaaacttcaatacatcaaagtaattagtaagagtattgaagtttttaactataattaatgaatatagtatttctatttgacaaaaataataatagaatatataataattttaaaaaattgaattttataaaatataatttgttaagatataagcttattcgcttaattttatattaaagatgataaggagagaagcaaaatgatatatgattattcagtaaaagatataaatggaaatctggtttctatggagacatataaaggaaaagtattactaattgttaatactgctacaggatgtgggtttactccacaatacgaagggcttcaaaagctttatgataaatataaagacagcgggtttgaaatattagattttccatcaaatcaattctttgagcaagcgcctgggactaatgaagagatatcaaatttttgtaaattaacatacggaacaacttttaaaacatttgcaaagattgatgtaaatggagagaatagtgatccgttatatgttttcttaaagaaagaggcccctattgcaaatgaagacgatgcatcaaagggattgtataatcttttatcagaaaaaggctttaatacaagcggagatgatattaagtggaattttacaaaatttcttgtatcaaaagaaggaaaagtgatagctagatttgcaccaacctatgagccagaaaaaattgctgatcaaattgaaaaattaattaatgaaaaataaagaataaatataaagactcctttaatgtacgtgtgattaaaggagtgttttgttttatagtgaaaaatattttttatataattaaaaaatgtaatttggtatggttgagaataaattctgaacggggagggaattccagctttatataaaatgcctactaagattttcttaaaaaatatattagagaataaaatactgaccaatattactgtaagtagtattggtcagtatataacattggaaatgctcgaaataaaattatcaaagtcatgaccatggaatctacttgaaaataaaattaaggttatttatagatcatgaaatgttatagaattaaatttaacgataaggggaataataattaagaaaaagcagataatataataaaatagcttgaaaacatatataattggaaaaatgtttacattgacaatatggtgctataaatgataaaatatttattttacttgactaatttatgattttgttatataattagtatgaaagagggtgtttacatggaaaaagttaaaactattgcttccattaaaaacgatatagagagacacgtcggtcagaaagtgactctaaaagctaatggtggaaggaaaaagattttagttaatgatggtataattgaaagtgtatacccaagtatttttgttataagattaaaaaatgacacccaaaggaccgtgacttatagttattcagatgtattaacaaagactgtacaattggtatttccaactagaatataagcttcgattaattcggagttttttctttttctcttattttaaaaatgagtttctgccgttgatatttatttaaaataattaatgaattagaaattgtaagaagtgtttttatacgtagaaagctataaatagaatataattttaagattaaaataataataggatttagattaactaaataattttataaaaaaagaaagatggtgggtttccatctttcaactatggtataaaagggtattgagaatttatgagaggttatatggtcaataaccaattactatattacgacaaaaaatagtatatgtcaataaaaaacgcaaaaaaatttaaaaaaatattgttaagtagatcaagtaaaaggtttacttgattttcgggaataaaataaaaatatatttatcataaatttctacttagatgtatataaatgaatagtaggaattttatggaggtataaaatatggcagatatagatattgtaaaagaaaatgtacagtttgaacaattgcttagggaaaataatacgaattcggtattaaaagatgaatacttaatccctgatacccatcctgatgtacaagagatattaactgttgaagctagacccatgataactaataaagaaataattggagataaagtagttatagaaggaaaggttgagtacacagtaatatatttagctaaagaagagggactcgcagtaaattcagtaaattataatcagaactttacaaataatattgacttaaatcaaggggaaaatagagtaatttgcgaggcagagtgtaatattgaacatattgaagcaaacataatgaatgagaggaaaatatctattcagggtatagttactgtagagtgggaactttacaagagcaatgaatttgaatttgtaaaagatattgagggcaatgatcaagtagaagtattgaaaaagacagagacaattaataaaatcaatgcaacagaagatgttgaattagtaggtaaatctatgattagagttggtatggataaaccacaaatcagcaaaatattaaagtgttccttactacttcataaaaaggaaataaaaataacagaagataaagtttatcttggctgttactgcaaattaaatatactatacaaaggagaagattctaaggaaataattccattagaagatgatatttatttatcaaaagaggaagaaattaatggtataacatcagatatgattccaacagtttcctatgaaatatcaaataatgatttaatgctagaagaagatgatttaggcgaaataagaattataaatgatgagcttgtagttagagcaaatgttaagatattttcaaaagaaaacatagatactattaaagatgcatattctaccaattgtttgcttagtctcaaaaaagatgaacatgaagttggaattcttcatggaatgaataattctgaagcaattgttaagtataatattcaattgaaagataatgatttgagacctgaacatataatatccgctaatggggctataatattaacagataaacaagttgtaaaagacagagttattgtagagggaattataaaagcaagtatattgtataagacaactgatgaggaaaaatacctatcaagtgttaaagcagagataccattttcagctgcaattgatatagcaggtgcagatgaaaatatgaaatctataattaaaagcaatttagaaaacattgaagcagctatagaaggaaataatatagcgattaaagctactgtgatactatctggcagagtattgtatgaaatgaataaagaatttgtttcagatgtggttgaagaagagggcgatattccagaaaagaaagccagtattactatatacgtaattggtaaaggggatactttctggaacttagcaaaaaaatataatacaacagttgacgatttgattaagataaataagattgaagatccagaacatattgaagaaggacaaaaattgataataccaggaagggcaatattctaaaattaattaaattcataatattagagatactttaagaatttcattagatgaattctggagtatctctttttttcgaagcaatattattaaaatctaaaaaatagaaagaatttagaaaaagtttttggatatgaagaaaaaaatagttacataataaaatgaaaaatacacaaactaagttttgttttatagttgctaattacttctaacttaaggaagtaaaaactagagaaattattcttataggaaacgtgatttggcatttgcagcagccaaatttcttgaataattatttaatctggtggatagaatatgtaatgcatgatatgaggtgagaaaatttgaaaaaagttttaagtggtaatttaataatcattggaggagccgaagataaagaaggcaaaaaagaaattttaaaaagagtatgtgattcaattgacaaaagtaaagatactttattaattgcaactattgcaactgattatcctaaagaagccgcaaataaatataaagaggtatttggagagcttgaagtaaaaaatataaaggtattagatataagcgagagaacagaagcgtctgatgatatgaatgtagagctaatcagagagtcctcattaatattttttaccggtggagatcaattaaagataacaagtttaattggcggaactccggtttatgatgcattagaagaagcttggaagaatggtgcatttatagtaggtacttcagcaggggcatctgtaatgagtgacacaatgatagttcaaggggaagatgacgatgatcctagaaaatgcacactaaaaatgtctccagggcttgggttgattaaggacgttataattgaccaacattttgctcaaagaggaagaataggaagactattaacaggaattgcacaaaatcctgaggttttaggtataggaatagacgagaatacaggaatagtagtaaaccaatctggaatgatagaggtaataggtgaaggggcagtttactttatcgatggtagtgcaattacatatactaatgtttcagaattatatgcagatgatattttgagtatgcataatgttaagttgcatgtattaactgatggaaataaatttgatcttataaaaaagtcaccttttgaggaggaaaagtttaatcatgaagataatacaaaagagaatatatgaaggccaaaatatttattctcataaaaaatgtataagaatagatatggatttggaaggatattctgaaataccaagtaaggacataccgaattttaattttaatcttgtaaatataatacctgaattaaaaaatcatagatgcggaattgatgaagaaggtggttttgttaaaagactaaaagaaggaacttacctagcgcatatttgtgaacacactatgatagcgatacaaaataatttggggatagatgttgcttatggaaaggcaagagaaattaaaggcgatatgtattatattatcgtacaatatgaatataaaaatacaatacttgaggtggctaatttagccatagatttgatgaattctttgatagcacaaaatccaataaatttcgatggaagaatgaaaattatacaaaacatattgcaaaatgagcaaatgggtgcgactacaaaagcaatatgtgatgcggcaagggaatataaacttcctgttatgcaattaggggatagcaccatatatcaaataggatatggaaaagcaggtagacttatagaagcttctataggaaacaagactagttgtgtaggagttgatatatcttgtgataagctcttaacaaaacagttgcttcaaactcaaaatatacctgtagctgatggaagcaaagtgcttaatttaattgggttattacaagaagcagaacgaattggatatccagtggttttaaagccacaatgtggaaacaaaggtcaaggtgtaatactaaatataaaagatcaaaaacaattggttgatgcatatattaacttaagaaaaaatcaaaaggatataattttggaaaaatactttgaaggaagcgactacagagtttgtgtcgtgaattataaagtggtagctgcatcattgagaattgctccatatgttattggaaatggaaaagatagtttaagaatgttaatagaggttcttaataaagatccattaagaggagaggatcatgaaaaagcattaaccaaaataaaaattgatgctgagttaatagcatgtctttctaaaagaggattggagctaaactatatccctgaagagggtgaaaaaatattattaagagagaatgcaaatctttctactggcggaatagcaatagattgtactgatgaaatctgcgaagagaatatagaaagttgtataaatgcagctaaaactttaggtttagatatttgtggagttgatatttgtgcaaaagatattagtgttccgctcaaggacaataatggaatagttttagagataaatgctgcaccaggtataagaatgcaccatttcccttcaaaaggtaaaaagcgtaatgttggaaaagcaatacttgaaacgctttatgatgaagaacctaaaaatatacctgtaatatctattacaggcactaatggaaagacaactactacaaggttaataagtcatgtactaagaaagatgggaagcaatgtaggcatgacatcgactgatggtgtatatttgaatgaaaagtgtatacataagggagacgattctggatttaatagcgcaagatcaatactgatgaataaagatgtagatgtagctgttttagaaactgctagaggaggattggttaaaagcgggctagcatatgagttggcagatgtagcaataatcacaaatataacaaatgatcatctgggcttggatggaattaattctattgaagagttgagttttacaaaagctttagtaggagaagctgtaaaagatgatggttttgttgttgtaaatgccgatgataaatatagcaaaactgtaataaatagattctcagcagaaaagatttatttttcaaaagataaagaaaatccgttgatacaagaaaatatagctaatggaaaaatagctgtatttgttgaagatgataagatttgtgtgattaataataagaagaagtatgaaattgtatctgctagagagttaccaatatcatataatggaacattagaatataatatagaaaatgcaatggcggcttgtgcaggtcttgtaggcttagaagttgattattgtatgatttcaaaaggttttatggattttgggttaaagaacgaagataatagcggaagatttaatatgtataattaccttaacagaagagttatattagattatgctcataatattgaagggtataaagcggttatatcttcattgagaaagattaaaggagataatgatttaattggggtaattggaataccaggagatagaaaagacgatataggatacgcaataggagaaatatgtgctaataattttgataaaatagtaataaaagaagataaggataaaaggggtagaaaatctggagagattgcagatatattagaaaagtcaatattgaaaactaataaaaatgcaaatttaaagatttgtctagacgaagttcaagcgttaaaatatgcaatagatataagtaataaggacgatataattgtagtattctatgaaaaattagattctcttttagagtttataaatgaggaaccaaacaaacaactagatacgttcgatgaagaatataaacagtatagtaatacactataactatttataaaagatttaaagttatctaaaatcgacgcatagtagaatgtttaaaaagcattattaatccttttttaatttattaattagacaagattttttacctatgataaaatattgtcaaaatgttaagaaaggaataagataatgaagattaaggcttatgccaaaataaatattgccttagatattgttgggaaaagagaagacggatatcatatattaaaaatgataatgcaaactatagatttatatgacataatagaaatagaaaaaactgaatctgagataaggttaaactgtaataaacattatgttcctacagatgaaagaaatttagcttataaagcagcgaaaatatttaaggaaacttattctattagtcagggagtagatataaagttaactaagaatatacctgtttcagctggattggcaggcggaagtactgatgcagcaggagttttaaagcttatgaataagatgtttaatgtaaatgcaagtgatgaagaattgaaatctatagggctaaaactaggagctgatgtaccatattgcataaaaggtggaacagcactttgcgaaggtataggagaaaaaattacccaattaaaatcatttaaagataaaataatagttttagtaaagccaccttttggtgtatcaacaaaagaagtttataaatgttttgatttatcaaaagttgtatttcatcctaaaatagatagtttaatagaaaatatgaataatgatgatgtttattttgtagcaaataatatgaaaaatttattagagaatgtgactttaaggaaacatagagttattgctaacattaaggaagaaatgaaatctattggctctataggtacaatgatgagtggtagtgggccgactgtttttgctttttttgatgatatgctaaaagcgcagttatgttatgatgaaatgaaaaaaaaatataaagatgtatttataacaagaacaatttaattcaaattgaatgtataaaaaacctccaagtggtaataattttagctacaagggggtttgtttatgataaaatatttgaaattaaaaaaaatagtattggtagttttaataacattaagtataaatatattttctggatgtacaagcattagcggaggtaatagtacaagtttggtaaatagtttaattgcaacagaaagtaataaaaacgagaataatatgagggtgctcaattacgacgaggttaaagattcattaataagatttcatgttattgctaatagtgataacgatgatgatcagcaattgaagttaaaagttaagaatagagttatagattatctatatccttatttaaattcttcacagtcattagatgaatcaagaaaaattataaaagataagatggaagatgttaaaacacttgcacaagaggtaattaaggataataattatgattatgatgtaaaagttgaattgtctagggaaaactttcctgataagtcttatggtaatatcactttgccgcaaggaaattatgaggcctttagaataattataggaagtggacaaggaaggaactggtggtgtgtaatgtttcctccactatgttttgtagacgaatcaaaggcacaagtggaatatgataaaacggagaataaaataaagtcaaatggaaaaagttttggattagaatctaaagacgattcaactgaaaatgtagaagataagcaagctgatggaaataatataaagataaagtttaaaatagtggaaatatttcgagatatatttaaataagattaataggatatttggaagttttattcacaaaatttatatagttgtcaaatgaatttaataaagcttacttctgcaagttaaaaaaattttcaaatataatatattataagtggagggaaatatgaagaaaaaagctattataacggtggatagttatgtgttggataatgaagaggatcttgtaggtgtagtaactccgggagatttccatgaaatagaagatggatttaaggtagagtatgaggaaacaaagctttcagggatggaagggacaaagactactataataataagaaatgattcttttgatttaataagagaaggcactacagaaactaaaatggaatttagaaataatcatagaacaatatctctatataaaacgccgtacggtgttatggatcttcaaatagatactaaaaaacttaatattgatattagcaaagagggcggaacaataaccgcaatgtacatactagaaataggtggacagcctgcattgaagacaaacttaactatcggtgtgaaattaaattaagtaggttctatatttatttaaatactccctttgtataaagagatttaggaataagttgattaaattagaaaaaaatgggatataatttcaaagggaggaatatatatgcaaaatggattgaaatatatagagatattgaataacatatgcgaatattacggaattgatgaagaaaaatttatagaattgctaaaaaatagagataataaatatatattattattattattaaaatataatcactgtttagatactgagagagttaaggaagtttttaatctaaaaacttctaagagtataagtaacaatttgaaactagcagaagaaaagttattaataaatagactttttagagagaagtactttgaattagaagataatataggaaagaatagcatgaccaatttattataaaaaaaagactagatattggagtagatatgtgatattataatatctatgttattaagcaacacaagtgccccatattatattatggggtgattttcattatagcatgactttttgaaaaagtcaatattaatttagaagaacattttaacatagggaggataaaaatgagtactaaatacgtttttgttacaggcggagttgtatcagcactaggaaaaggaataacagcagcgtctcttgggagattattgaagaatagaggggtaaaaatttctattcaaaaatttgatccatatcttaatgtggatccgggaacaatgagcccttatcagcatggagaggtttttgttacagatgatggagctgagacggatttagatttaggccattatgaaagatttatagatgaaagtttaacccaaaattcaaatgttacaactggtaagatatatagttctgttatagaaaaagaaagaaggggagaataccttggaggtacagttcaggtaattcctcatataactaatgctataaaagataaagtataccaagtagcaaaagatagagatgttgatgtggtaataactgaaatcggtgggactgttggagatatagaatcacaaccatttttagaatctattagacaaataaaaagtgaagttggagctgaaaatgtttgttacatacatgttactttggtaccatacttgggaaaagcaggagaattaaagacaaagcctactcaacattcagtaaaagaattaagaatgataggtatccaaccagatataatagtatgcagaactgaaaaagaattatcagatgatgttaaagctaaaattggattgttctgtaatatagacggaagatcagtaattcaaaatcttgatgcggaaaatttatatgaagttccattaatgctacattcagaaggtttagataatcttgtatgtgaaaaattacatttaggatgtaaagatattgataattccgaatggattcaaatggtacaaaagattaagaaccttaaaaacaacgtgaagatagcattagtgggtaaatacgttgagttacacgatgcatacatatcagtagttgaagcattaagtcatggtggatatgctaataatactaatgttgaaattaagtggattaatgccgaaaatattgaaaacagtaatgctcaagaattacttaaagatgttgatggaatattagtgccaggtggatttggtgacagaggaatagaaggtaaaatagcagctataaaatgggcgagagaaaataagaaacctttcctaggaatttgcttgggaatgcaatgtgccgtaattgaatatgcaagaagtgtattagggtatgaagatgcaaatagttcggaaataaacccaggtacaaattatccagtaatagatcttatgccagatcaaaaggatatagaaaatcttggtggtacaatgagattaggattatatccttgtagattagctgaaaatactaactcttatgaagtatataaaaatgaaattatcaatgaaagacatagacatagatatgaatttaataatgaattcagaaaacaaataactgaagctggaatgaaaattgcaggaacaagtcctgatgaaagattagttgagattgttgaagtagaagatcatccatggtatgttgcagtacaatttcacccagagctaaaatcaagacctaacaagccacataagttgtttgtaggatttattaaagcagcattagaagaaaataaatcaaagtaatttgttttattattgagtttaatatataataagtattataatttattatatattaaacttattttaataactttagtagtttaaattattgatcatgaattatataaaataaaatttaatatattgcattaaatttgaaataaatatccaaactaatagaaaatgtatttttacaagtattattctaaaatattctcaaatatatatcatttctaactatcttactgttaaattttccgatataaaatataactaaaattataaaagaattgattttatagattcatatctataaattggaggtgcgaacttgacaaaaaaagaatatgaaagcatgactttaacaaagttaaaagatattgctaaagatttaggtgtgaaaaatatatctaaatataaaaagaatgagctaatagaagaaatattgaaagttcctagtaactttatagaaaagaatggtgttatattaagagaaaatatagcacctaagaatgtagaagagactagaagtgttatgcctagaagtaataatattgaggcgaataaagaaagcaatgattcagaagtgaaatctaggacaaatgaaattgggaatgtggaaaagaaagaaaatttaaaagaaatgataaatgaatccaacgttgcaaatgggattttagaaatacttgaaaataatagttttggcttcctaagatgtaaaaactatttaactagtagcgaagatgtttatgtgtctccatctcagattagaagatttaatttaagaacaggagatgaagttgagggtaaggtaagagaagcaaaggaaactgagaagtttaaagctttattatttgttcaaaaagttaatggagaacatccggaaaaagctataggaagaaaatcttttgaaacattaacaccaatatatccaaaagaaagattaaaattagaaacatctgatagtaatgatttatcatcgagactaatggatataatatgcccaataggaaaaggacaaagaggaattatagtcgctccaccaaaggcagggaaaactacattattaaaaaagattgctcaaaatatatctaaaaattatcctgatgtaaagcttattgttttgcttatagatgaaagaccagaagaagttactgatatgaagaggtctattaatggagatgtagtttattcaacttttgatgaggaaccgcaaaaccatgcaaaggtagctcagatggtattagaaagagctaagagaatggttgagcaaggaaaagatgttgttattctcatggatagtataactagactatcaagagcatacaatttgacaataactcctacaggtagaacattgtcaggtggtcttgatccaggtgcacttataatgcctaaaaagttttttggagcagcaagaaaaattgaagagggcggaagcttaacaatactagccactgcactaatcgaaacagggtcgagaatggatgatatgatatttgaagaatttaaaggaacaggtaatatggaagttcatttagatagacgtctacaagagagaagaattttcccggctatagatatatataagtctggaacaagaaaagaagatttaattttatctaaagaagaattagaagtggcattctccataaggaaaaagatgtatagagatggaaactcagatgatattacagagaatttaattaatatgttatctaaaactggcgacaataaagaatttatagatgtattccagaaaaaaattcaataggtaacaaaaaagatgaccattttattctagtggccatcttttatttcttagaaattaaatcatctgctatatcgactattttagttaaagaataggttgatgataactctttgagctttagcttaattttggatagctcattagggttgtttattaagtaatttattttatcattcagcttgcttaagtcttttacatatattgaataaccttcgctagttagaaaatctatattttcattttcttgacctggtatggcaaatggaattattaatggaatgttctttactatagattctgtaacagttaatccgccaggttttgatattaagatatcacaataatccattaaataagagatatcttttgtgaaacctaatatatgaagttttttattttcaaagttattttccttacaataactaattaatctattttttaagttatcatttttgccacaaactactgtgattcttaacttgtgtggattttttaacaattccttaagaactgtaaaaatagtagttaatccaagacttcctcccataagcaataaattaaaatattcatcatcttttaaatcgtttgctaatgtaacttcagtataaaatttactacttataggtatgcctattggataaattttattaggattaatacctctatctactagagatttttttgtatagttacttccggttatataagcatcaacgtaagaatccacatatagataatgagctttaaaatctgtaactactaaaataaaaggtatatctaatccattcttttttagatctgaaattacgctaatattaattgaatgggtagctatgataacatcgggttgtattttgtttataagtttcgaaaccttctttcttgccataaagaagatgagttttaatagtttattggttaatttggtatcagttagtttgtaaaagaaaccataagttttgggaaacttcgatgccgaaaactcatatccaattacaattatatcgttaagaagcttgctgttcttggctaaaaagtcaagctttgtaatctcataaccagaattattaaatgattcctctacggaagcagcagcttgattatgtccctgtcctgtagatgttgttaagattaaaacttttttcatgaaagtcactcatttcaacattattatattacatagtttaccatgtatagtatataatttaaatattaaattatatacgctaatatattaaaatttagttatttaaattttaagtatgtataagtttgcaaacaattgcagtaaaatctatatttctaatatattagaaaattgaataaaaaaggaaagacatcgtctttcctcataaagttattacttgctgccaaggttgaatctcttgttgaatttatcaactcttccaccaacgtcaacaattttttgtttaccagtgaagaatgggtggcatttagagcatatttcaacttttagttcttctttaacagaaccagtagtgaaagtgtttccacatgcacacttaaccactgtattgtggtggtattctggatgtatgccttctctcattatttttcacctctttcaattatataaactatgttaattattcaataacaaccaccatattatatcatagtagaattttagcgtcaataataaatccgtgtatgtaaataatataaaaatgtctttttatgatcactattaaatgatataatcgattatgataccttaaataaggagagtattttacagatgagtaaattatattttagatatggggccatgaattctggaaaatcaactcatttaatgcaagttgcttataattatgaagaacgtggtatgaaggtggtaattattaaacctagaattgataacaaaggtggagacacacttgtatctaggttaggagtaaataggcgggtagatttattagtttcagatcaggatgatatctttcaaataatcagtaattatataaaagaaaataataaaatagactgtatactagtagacgaagttcaatttttaagagaatcacaaatagatcagttatttgaaattgctgtaaagattaatatacctataatatgttatggtctaagaactgattttaaaagaaatggatttgaaggtagtacaagattgttattgttggctcatagtattgaagaaatgaaaacaatctgtgcatgcggtaggaaagctatatttaatggaagaaaaataaataataaatttgtatttgagggagaacaaatcgcaattgatgatgaagataatgttgaatatgagtcattatgtggagagtgctactataaatacaaagaaaattaattaggagagtaagtgatttttataaatggaaagacgtgatgttggagggcaagctgtcatagaaggtgttatgatgagaggaagtaaaaatcttgcgacggctgttagaactcctaaagggaatatagaaatagattttaaagataatagaccagtgacaaaaaaatatccgattttaaatataccttttcttagaggtttttttgtactagtagaatcaatgaaggttggaatggaatcattaaactactcagcatcatttttggaagaagataatgaagaaccttctaaatttgaaaaatggttagatgacaaactgggagaaaaggctaatagtgtattaatggcaataactatgtttatttcttttctttttgccataggacttttcgttgcattgccaacaggcatagcatcagttttcaaaggtgcaggtatttccaatgtaatgctgaacctgattgaagctcttataagaatagtgattctcttgctttacatgttttttataagcaaacttaacgatatatatagagtgtttcaataccacggagctgaacataagacgatattctgttatgaagctatggaagaattaacagtagagaatgttagaaaacagtcaagattacatccaagatgcggtactaactttttgtttttggtaatgtttgttagcattatagtattttcttttactgggtggggtggaattgttgaaaggttagctcttagaattgttcttataccagtagttacagggattagctatgagataataaaatggcttggtaaaaatgacagcatactagctcaaataatagcgtatcctggtcttaagttgcaactgttaacaactaaagaaccagatgattcccaaattgaagtagctattgcatcgttgaaagcagcagaaggaataaaagatccaaataaaaatattgaagagttaataaaaactggtacatcgacattaaaagaaaatggaatagatactgctaggttagatgcagagctattgttaggaaatattattgaaaaagatagggtttatttaattacacataaagaagatgaagtgagtaaggaagatgctgaaaagtattttgatttgattgaaaaacgtagaaataaaatgccagtaaaatatattctaaataaatgtgaatttatgggtatcgaattttatgttgaagaaggtgttttaataccaagaggggatacagagatacttgtagatgaagttcttaaaattatagaagaaaatcaagaaatggaaatatgcgatttgtgttctgggtcaggtgcggttggtatatcattagcacattttaggcaaaatataaaagttgatttaatagactattatcctattcctgaaaaagtatcactaattaatatagagaaaaataagttagaagatagggttttctttataaaaagtgatttgttagaagagtcgataaaaaataataaaatgtatgatattatagtatcaaatcctccgtatattgaggaatgtgaaattgagaaattaatggaggatgtaaaaaattatgaaccgcacactgcattaagcggtggaaatgacggattagatttttatagaaaaataattgaccaaagccaatatacattgagagaaaatgggatattagcatttgaaataggatataatcaaggagaagcggtaaaactattaatggaaaataacggttttactaatgttaaaattgttaaagattttgctagccttgatagggtggtagttggaattaaaatttaattgaaacagatctttgagatataagaacgagttaagaagacatagtatgcacaatttataaatgaggttagttggttaagtgattaaaatatgatataatgtagaaatgtgaaaaaagaagtacggagtgatcaaatgttattagataaattagaatttatagaaaacaaatatgatgaattatcagtgaaaataagtgatccatcaattatgcagaatcagaatgaatggagaaaactatgtaaggaacatgctgacttagaagttatagttaatagctatagggaatataagaaagtagttgaagatttaaaagctaacaaagaaatgttaagcggtgaaagcgataaagagatgagagaaatgttaaatgaagaaatagctgatctcacaaatagagaagaacaactagaaacagaaatacaaattttattattaccaaaagatcctaatgatgataagaacgtatttgttgaaatcagagggggtgcaggcggtgaagaagctgcactatttgcatacaatttatttagaatgtatacaagatatgctgaaactcaacgatggggcgtagaaatcatgagtttgaatgaaacagatcttggtggttttaaagaagttgtttttatgatcaaaggtaatggcgcttattctaaattaaaatatgaaagtggagtgcatagagtacaaagagtaccagatactgaatcaagtggaaggattcatacttcaacagctacagtagcagtgctaccagaagtagatgatgttgaaatagaagttgcagataaagatgttagaatagacgtatttagagcttcaggaaatggaggacagtgcgttaatactacagactcagctgttagaattactcacttgcctacagggcttgtagtttcatgtcaagatgaaaagtcacaattaaaaaataaagaaaaagctatgaaagttttaaaatcaagattatatgaacaggcagaaagagaaagagcagaaggaatagcagaagatagaaagagccaagttggaactggggatagaagtgaaagaattagaacatataattatcctcaaggaagaattacagaccacagaataggactaactttatataagttagatacatttttgggtggagatattgatgaaatgataaatgcacttattacagctgaccaagctgaaaagatgaaattaatgggaaacacacaaatgtaataactataaagcaaagccttgcattatatatgtagggctttaaaagtacattggagattgattatggatatatataaggctgtaaaaaaagagcgattacatttaaaaattttcttaattaccatggttattattgcgttttttcttccaacagttctaataataaccggattaactactattttttatattagttatgtaatttttatagaatttttaatagttatagctattataattaagatgaatgcctatattgttgaatataggtgcttaaataataggttgattttcaaggtcggtatttccattaaagaatatttaattatatgcgataaagttgtattggtacatacaaataaatctgactatgatttggaaatagttttaataacaaatgttgtttttaaaaataaggggttaagacctgttgatgatggctttttaagaagatatccacaaattatcgaagattataattctataaaacaattaaattctcagaaagagtattattttcaagtaataaaaagaggtggattgaagaagtatttattattagattcaatatacaggaattgtgttaaagctatttacactgatgaaagtatacaaaatataaaaatatcaagaggccagcttatagtttaatcaggaattttttagaaacaataagtttagaattaggggaagaaggtaatatgtttgaaaactaaaattagtatgatcaaaaatgttagtgaggatgaagagaaaatcagagaagctgctgaatgtataaaaaatggcggtactgtagtttttcctacggagacagtttatgggttgggtgcagatgcgcttaatgaagaagctgtagagaagatatttaaggccaaaggaagaccacaagacaatccacttataattcatgtttcgtcgaagaaacttgatctatatgcaaaagaaataccgaaagtagctgatgaacttataaatagattttggccagggccactcacaataattttgagtaagaaagatataatacctaatgtaacaagtgctaatttaaactctatcggaataagaatgcctgataatgaagttgctagaaaactcattgaattatctcagacaactatagcagcgccttctgctaatataagtgggagaccgagtccgacagattttcagaggtgcatagaggatctggatgggaaagttgattatattcttggaggagaacagagtgacataggtgttgaatctactatagtggattgcacagtagtaccacctatagttttacgaccaggtggtattacattagagatgcttagagaagttgatccaagaattgaaatagataaagctataatggaaaaaccaagtgaaaacttaaagccaaaggctcctggaatgaagtataagcattatgcaccaaatgctaaagttacaataatttctggggaaagaaaaaaaactattgaaaaaatccgtgaaatggtacactataatatagaaaaaggtaaaaaagtatgtatcctcactgttgaacaaaatgttgatgaatatacagaaggaactggtatagtattaggtagtctaagtgatttatcaacagttgctagaagtttatttgaagcattgagaaagtgtgatgacctaggagcggatttggtttttgcagaaggatatgaagaaaaaggtgtaggggtagctattatgaatagattaaataaagctgctggatttgatattataaatgtataataattatgcatgttgaaaaaccacaaaataaattaggagatgatttaattatgaaaattgcaattggatgcgatcatggtggatttgaacttaaaaatgaaatcataaagtttttggaaagtgaaaagtatgaggttaaggattttggcacatattcaacaggttcttgcgattatccggatattgcattaccagtagcagaagcggttgctgcaaaagaatatgagtttggtatattaatatgtggtacaggaataggaattggtattgcagctaataaggtaccaggaattagagcagcgctatgttcagatacatttagtgctcatgcaacaagagaacataataatgctaatatattaactatgggtcaaagggttgttggagcaggtcttgctttagatatagtaaaaacatttatatcagctaaatttgaaggagataggcaccaaaaaagaatagataagatttcagatattgaaaaaaagtatacacattagaaaaaagcagctatgctgcaatcaagatcatttaggttagaaaaaagtagctatgctgcaacaatattaatttacattattagaaagctaaatggggtatataaatataaagggctataaatactaaaagcaaacttggaggaataataatgagcaaagttgtagaaataaatcatccactaatattacataagttggcaatcttaagagatgaaaaaacaggttcgaaggattttagaaaattagtagaagaaatttcaatgttaatggcatatgaagtcacacgagatttaaatacagaagaagtagaagtaaaaacaccagtggcagttactaaatgtaaaatgcttgcaggaaagaagatggctgtagttcctattttaagagctggtctcggaatggttgatggagtacttaatttaataccagcagctaaggttggacatattggattatatagagatgagaaaacacttcaaccagttgaatatttttgtaaaatgccacaagatattgcagaaagagatattatagtagttgatccaatgcttgctacaggtggatctgcaatagatgctttaactatgttaaaaaatagaggagcaaaaaatttaaaattaatgtgcttggttggcgcaccagaaggtatagaagctattaaaaaagcacatgatgatgttgatatatacttagcatcaattgatgaaaaattaaatgaacatggatatattgttccaggtcttggtgatgctggagatagattatttggtactaagtaattagtaatctattagaattaaaagctatctacataagtttctgaatgacccaagataattttactggggggaatatagaaaatggagagacgagataagaaaaattattacttggatattgctgaaacagttttagagagaggaacctgtctaaggagaaactatggttctataattgttaaaaatgatgaaataatttctactggatacacaggagcacctagaggtagaaaaaattgcatggatttgaatagttgcataagagaaaagttgaaagttccaagaggtactcattatgagttgtgtaggagtgtacatagtgaagctaatgcaataataagcgcttctagaagagatatgattggagctacattatatttagtaggacgagatgcaaaaacaagagaatatgtaagggatgcaaactcttgctccatgtgtaagagattgataattaatgctggaatttctaatgttattataagggattcaaagcaggagtatagagaaataagtgtagattcatggatagaagacgatgactctctaagaatagtaaaagacgcaggatattaattttttagaatttgcatatttgaataaatccaacaagcattgcgagttggatttatttttaaagtataaactttaccagatagctagtatgcgtaatacgctttttcctttaatgaggagataacggctgcacggcgctggataagtttcaactaagattcagatggagactaaactacgcctgaattaagtttaacttgattttaaatatacataaagacagtacttagaaatagaatgagaaaaatctataattgcttaaatataggaggaaataatttgagtacaaagaaaattattacgatttttggaactagacctgaggctataaaaatggcacctttagtaaaggaattagaaagaagagaagagattgaatcgaaagtttgcgtgacggctcaacacagagaaatgttagatcaagttttagagttatttgacataaaacctgattttgatttaaatataatgaagacaaaacagactttaacaggaattacaagtagagttttagaagggttagaggaagtttttaaagaagaaaagccagatatgatattagttcatggagatactacaactacatttgcaggttctttagctgcattctatcagcaaattaaagttgggcatgttgaagctggtctaaggacttttaataagtattttccttttccagaggaaatgaatagaaaacttacaggaagtctagctgatttacattttgcaccaactaaaggttcgaaggaaaacttactaagggaaggaataaatgcgagtgatatatatgttacaggaaatactgtaatcgatgctatgaaacatacagttgaagatgattacatctttgaaaacgaagagctaaataatattgattttagtaagaaagtaataatgatcactgctcatagaagagaaaactggggagaaggaatccaaaatatatgtatagcattaaacaaaatagttgaacagaatgaagacgtagaattagtgtacttagttcatttgaatcctgtagttaaagatgtagtttatgagagacttggaggaaaagaaagagttcacttgctgtcaccattagatactaaggaaactcataatttgatgaataaatcatttatggttatgacagattcagggggattgcaagaggaagcaccacatttagcaaagcctgtacttgtgctgagagacgttactgaacgaccagaagctgtagaggcaggtactgttaagctagttggaactaatatagatcaaatagtatcagaggcaaacgaattacttagaaaccctgatgcttattgtaaaatgagtaaatctataaatccttatggagatggaattgcatctagaagaatagcagatgctatattaaaatattttggtttgacaacaagagaagtagaagaatttaaaagataaagtttgtttaaattttaacaatttatgcttgataaaagaaataataaaaggtataatttagttatgttaataatttaacgaaagttaataaaataatctataaaattttaggaggtcaaacatgagagatgtagttattgtaagtgcagtaagaacagcgttaggtagttttggtggagcattaaaggatgtctcagcagtagatttaggagctttagtaattaaagaagccgtaaatagagctggagtaaaacctgaattaattgaagaagttattatgggtaatgtaattcaagctggtcttggtcaaaatactgcaagacagtcaacaataaaagctggattaccacaagaagtttcagctatgactattaataaggtttgtggatcaggtcttagagcagttagtttagcagctcaaatgattaaagcaggagatgctgatgttgttgttgctggaggtatggaaaatatgtcagctgctccatatgcattggacaaagcaagatggggacaaagaatgggcgatggtaaattagttgatacaatgataaaagacgcattatgggatgcttttaacaactatcatatgggagttacagctgaaaatattgctaaacaatggggattaactagagaagaacaagatgctttctcagcttcatctcaacaaaaagctgaagcagcaatcaagtcaggaagatttaaagatgaaatagttccagttgttattcctcaaagaaagggagaaccaaaagtatttgatacagatgaattcccaagattcggaacaacagcagaaactttagctaaattaaagccagcatttattaaagatggtactgttacagcaggtaatgcatcaggtattaatgatggagcagcagcttttgttgttatgagtgcagaaaaggcagaagaattaggacttaaaccaatggctaaaatactttcttacggttcaaaaggattagatccagctatcatgggttatggaccattccatgcaactaagaaagctttagaaaaagctaacttaacagtagaagacttagatttaatcgaagctaatgaagcttttgctgctcaaagcttagcagttgctaaagacttaaaattcgatatgtcaaaagttaatgtaaatggtggagcaattgctttaggtcacccagttggagcatcaggtgcaagaatattagtaactcttcttcatgaaatggaaaagagagatgctaaaaaaggattagctacactttgtataggtggcggaatgggaacagctcttatcgttgaaagagtttaatataaattaagatttaaaaaggttactatgataattttcatggtaacctttttttattaaatataagtataaaataaaatgaaaagaagaaaatagaaatgcatgtattaaattagataaggtcagtaaaaaaatcaaaattattatgtacattaatcatctgatagaaggggtgaaaatattatcaaaataattactatatataaatcagtggaaaaaatgaaagagtttttaatcatatatttcattaaggtgttttatatacttcataacatagttaatgtgaggatttgctaaataataatacatataaatttggtaattatagattaaaaaaaataaatattgaataaggattaatttctgtattcaataatatgaaatgtataatagtaagtatagctttataaaacccaaaaatagtataaaattcaccaaatttttgaaaattgatgacaaaatttgtaatgaaaatgttaacaaaaataatattttgtagataaatgttacagaatatttagaaaattgaatcaaacaagcttttaaaaatcattaaatgagaaaaatgaagaaataaccaatattagctgagcattcacgagcatatgaaatataaattcattataaagtaaaaataagctgattttacttttaaatagtgttttattaaagataaatataaagatataattactgatattgaggttaagggggttatgtatgaataaagaagtgaataaactgcttctacaaacgataaaatacgatttggggagcggattattgatatctttaataatagtcttaatttccacctttataaatgcaggaatctatatgataggcatgtgtgtgtcgctaataaattttctagcaagtggttatatcgttgggaaatttttggataaaaatagagcatggattataattcctacgtattttattaggatggcattcataattgctacagtatttccgtttttaggaaatataaaatacgtaatatattatatgataggctttgtttcacattatgtactacttatagtttttcgtattaaagaaaataggaaaggaagtgtttagagtggagcccgtgatacctatattttcacctgaaatttttggcgttacagtagatattactgcagggataataattgaatggattgttatcgcaattttagggataggtgcttttctattaacaaaaaacttgaagttaaaacctggcaaggtccaagcggctttggaaaaagtctatcaaacaataagggactttatggttggtactatgggtgaagaatatgaatcatttctgccttatataggaacattaatgatctatttgctaatactaaatctagttggattattaggatttaagccacctacaagtgatttgagcataacagcatccttcgcaataaccacatttttagtagtgaatttaaatgctattaaaaagaatggaatacttgggtttggaaagggattgttacatccatttatccctatgctgccattaaacataatagaaagaattattttgccaatgtctttggcgctaagactttttggtaacatggttgcggcagtaatattattagaattggtgtatcatggattgagttcaatatcaatttttgcacaatttggtatacctgtaatattacacgcatatttcgatttatttgatggattaattcaaatgatagtatttacaatgctaactatgattaatatcaaacaaatagcagaagaataagtttagaaaattattaaaaaattaaaattaattaatatcttaggaggaatcataatgagtttaggagttctagcagctggtatagctgtattatctggtattggagcaggagtaggtattggaattgcagctggtaaggcagttgaagcagtaggaagacaaccagaagcatcaggaagagtaatgacatttttcatattaggtgcagcactttgtgaaactacagcaatatatggattagtaatggcatttatgttaatgaacagataataaatttgtatgagttaattgcattgactccgaagggaggatataagtaaaaatggaagtaaatgtatcaacaattatattcaattggattaattttggtctgataatcttgattttaaaacatttcttttgggataaaatcaaaggaataattgaagaaagacaaaatctcgttaatcaaacgataagtaaagcagatgaagatgctgaaaaagctagaatgtatttggtaaagaatgaacaaattttacaatcagctaaagaagaaggtaagaaaatcactgaagctcaaagagcaaaaggtgataaactttacgaggaaattgttcaaaatgcaaaagtggaagcaaattcaataaaagaaagagctaacttagaaattgaaagagaaaaagaaaaagcagaatatgagattaaaaaacaagcagtagatttagcggtagagctttcagttaaagcattagagcagcaagtagatgaagcaacacatagaaaacttattggcgattttattgctaaggtaggtatgtaagtatgcaggagtatttagagaaaagatatgcgttagctctgtatgaaattgctgaaaagaataataaagtggatgaatatttacgagacttaacagatatatgtgatatatttgatgaaaataaagagttttatgaagtaattaatcatcctaaaataaacacagcaaaaaagaaacagttatttactgatttgtttaaaggaaaaattgatggagaattactttctttcatgatgatattgattgaaaaggatagaattcttcagttaagagaaatactaggtcaaatggaaaatattgatctagaaagaagaaatactataagaggtatagttaaaacagttgtaccacttttagatgaagaattagaacaattaaaagctatctttgaaaaaaagtacgaaaaaaatattatatttaatactaaaatagacaaaagtcttctaggcggagtttatgttaaagttggaaatgatattattgatggaactataaaatcaaaggtagaagaaatgaaagaattaatgcttaagaaagaatagaggtgaatccatgaatattaaaccagaagaaataacttctattataaagaaggaaatagagaaatacgaaaaagatattaaaacagtagattctggtactataatccaaattggagatggtgtttcaagagtttatggattagataattgtatgcaaggggaattgttagaatttcctaataatgtatatgggatggttttaaatcttgaacaggataatgttggttgtgttcttttaggagaagaaaaaggaataaaagaaggcgatacagttaaaggaacaggaagagttgttgaagttcctgtaggcgaagcaatgattggaagagttgttaatgcattaggagaaccaattgatggtaagggtcctataaacacaagccaaactagaccaatcgaaattccagcagcaggtataattgatagaagttctgttaatgagccattacaaactggaattaaagctatagattcaatgattccaataggtagaggacaaagagaacttatcattggagacagacaaacaggtaaaacagctatagctatagatacaatattaaaccaaaagggtaaagacgttatctgtatatatgttgctatcggtcaaaagcaatctacagttgctcatatatttaatacattaactgaaatgggtgctatggattatagtatagttgtaagtgctacagcttcagaatcagctccacttcaatacatggctccatattctggatgtaccataggagaatattttatgcatcaaggtaaagatgtattaataatatatgatgatctttcaaaacatgcaactgcatatagagcaatgtcattattacttaagagaccaccaggaagagaagcttacccaggagatgttttctatatacattcaagattacttgaaagagctgcgaagctatctaaagaattaggtggtggatcaataacagcacttccaattatagaaactcaagctggagatgttactgcgtacataccaactaatgttatatcaatcactgatggtcaaatattcttagaatctgatttatttaatgcaggacaaagaccagcagtaaatgcaggtatatcagtatcaagagttggtggtagtgcacaaattaaagctatgaaacaggtaagtggtactttaagattagaactagcacaatatagagagctagaagccttttcacaatttggatctgacttagatgccgattctagtagaagacttgaaaaaggtaagagattagttgaagtattaaaacaagatcaatatagtccacttgaagttggaaagcaaatcataatattatatgcagctgttaatgatttcttatcagacattaaagttagcgatataaagagattcgaaaaagaattcttagagtatgttgatactcatcatagagaaattgaaaaatcaattattacaggaaaaactttaactgatgaaataaaatctatgttagaggaagcaatagttgagtttaaaaagatatttttacaagaagcatagcttaaattcttaagctatgcccttcttaggaggtggagataatgggcgcagctggacttcttgaaattaaaaagagaattaaatcagttgaaaatacaagaaaaatcactaatgcaatgggacttgttgccacttctaagttaagaaaaactaaaaatgagttagcagtaaacaataagtttattgatataactgaacctgtcgtaagaaatcttgcaactacagctggtgaagaaggaagcaatgtttattttgaagggaatgatagtcaaaataaactatatgtagtaataacatcagattcaggattgtgcggtgggtttaacagtagtgtagtatctcaattagtaagtgaaattaaagataaaaaggatactgcaaagattgttttagttggaagcaaaggtcttggttatttaaagagaattaagatagaaccagtaggagaatatgttgggattgaagatgtgccaacagtaagcgaagcaaaagaaatatttgataaagctcttgaaatgtatttaaatagtgatgtatcagaggtgaatattgtatactctgactttatatcatcagttaaacaagaaacaaagtcagttaagattttgcctataagtaaatctgaaggaacaacaggatcatttcttattgagccggatttagatatagtattagaagatgctcttaatatttatctaaaaggaaaaatcagaagcattttattaagttcaaaatgtagtgaacaaagtacaagaatgacagctatggacggagcaacaaaaaatgcagatgatctattagacaaattaaagcttaaatttaatagaattaggcaaggtgcgattacgcaagaaatatctgaaattgttggaggagcagcagctcaaaattagtaaggaggtatcttatgcctggaaagatgggaaaagtagttcaagtaattggaccggtaatagatataaagtttgattcagattctctcccagatttatataatgccattgttattaaggcgggagattatgaattagtagcagaagttgaacaacacgttggagacgatatagttagaacaatagctatgtcagctacagaaggattaaagaggggaatggatgctgttgatacaggagcacctatttctgttccagtaggagaagaagtattaggaagattatttaatgttttaggaaagcctattgataagtgtggagatattgaagtaaaacaagaatatccaattcatagaccagcaccaagctttaaagatcaatcagttgagcctgaaatgtttgaaacaggaatcaaggtagtagacttacttgcaccatatcaaagaggtggtaagataggtctatttggaggagctggagttggtaaaacagttttaatccaagaattaataaacaatatagctaaacaacatggtggtttatcagtatttactggagttggtgaaagatcaagagaaggtaatgacttatatcatgaaatgagagagtcaggagttattgataagacagcattagtatttggacaaatgaatgagccaccaggtgccagaatgagagttgcattaacaggtcttactatggcagagtactttagagataaaggtcaagatgtgttattattcatagataacatattcagatatactcaagcaggttcagaggtttcagcattacttggaagaacaccttcagcggttggatatcagccaacacttgcaactgaaatgggtgcacttcaggaaagaattacatcaacagttaacggttctattacgtcagttcaagctgtatatgttccagctgatgacttaacagacccagctccagcaacaacatttgcgcatttagatgcaacaacagttttatctagaggtattgcggaacttggtatatatccagctgttgatccattagaatcaacttcaagaatccttgatccaagaattgttggagaagagcactataaagtagcagctgatgttaaacacgttcttgaaaagtataagcaattacaagatatcatagctatcttaggtgttgacgaattaggggatgaagataaggctatcgtggctagagcaagaagaattcaaagattcttatctcaaccatttacagttggtgaacaatttacaggattaaaaggtaagtatgttccagtaaaagaaacagtaagaggatttaaagaaattcttgaaggtaaatacgatgagttaccagaatcagctttcttatttgcaggaactatagatgatgttatagaaaaagcaaaaaaattaggataaaggggatgagcaattatggctaatacctttttactaaaaattataacacctggtcgtgaagtttataatgatcaagtagaaaaagtaactttaaaaagtgcagatggagaatttcaagtacttgcaaatcatcaaagtctaatatctactacgataccttgcatcgcgaaattcaaagatgctaagggaaatgatgaagagttatttatttctaagtcacttgttcaggttaataataacgaaatggttataagtagtgatgctgctgagtttgaggaagatattgatgaagaaagagcggaacgagctcttagaagagcagaagatagactaaaaaactcagaaaactacaatagaggaagagcagaagcagcattctttagggcaaagcaaagattagctctaaaaaaatctaatagataatattactataaattaaagtgtaccatcttttatataggtaaataccgtataaagatgctacactttattttttattattttttattctagatattgacaatctatcacaaaattttaagaaatttatattatatattatatagctggatagaaaagagaataaaagttaaaggagatggccataattaagaagataaattaaggggggcttaatatgaatataaaaatgagtatagtaatttttatattattatctttttttaatataggcgctatttccagcgatatagtcagcgctcaaaatttattcaatactttagaaatgaaagtgaaagatataagtgagtttcaggaaaatggtgtaaaacttcagtataggacgaaaaataatattgcagatgaagggtatagaataaaagaaagtttacccacaaatatgaatttctcttataaggatgatgggaatgatgagtttgaagcgtttaacagtgatttggatattaatataaaaatatggcgtgaagatgtatatagttatgttgaaattatattaacgaacaagaatcctaaatatgggacaaagtatttgaaaaacatacttaagaatattgaaaattcaaaattagaaaatacgcaatattttctttactatgaaggtaaagaaaaaggattagatagtgattattttacaaatggattagtcagtgaatataacataaggaaggcacaacttatgaaaatcagtaatggatactcagcaacaggttatttgaacgatggagaaaaaattaattttgcattagttgattatgatactggttcacatataataattggtacgccaataatatttacaacatattaagacatattgaaaaagcttttcaatataacctttattttgctttgggtataatatagatttgtttattagcgaaatcttattggatttttctaaagcagagtatatgtaatattttggacagttatttttcatatgcttaacaattcattatggaggataatatggagaaaatagtggttaaaggtgtaaaagaactgagaggggaagttaatataagttgtgcaaaaaattcaattttaccaataattgcggcaactatattgtgcccagagcctataattattgataatgcacctaagttagaagatgttgaggttatttgtaaattattaagcgaactaaactgtgacgttaatatttcaaacgtaaatgatagattgacgataaatacaaaaaatatagtagaaatggatgctaatgaagaacttatgagaaaaatgagagcatcatttttaattatgggacctatgcttgctagatttggatattgtaaattatcattaccaggcggatgtaacataggaagcagaccaattgatttgcatcttaaaggatttaaattacttggagcagatgttgtaataggtcatgggtttgtagaggtgatagcaaagaaaatggtgggtaacaggatttaccttgattttccatctgttggcgcaactgaaaatattatgatggcatcggtctttgctgaaggaacaactataatagagaatgcagcggaagaaccagagatctgggatttagcacaattcttaaataagatgggggctaaaatagaaggagcaggatttggaaagataactataactggtgttaaaaatctaaaaggaattagttatacacctatatatgatagaatagaagcaggaacattcatgatagcagcagctattacaaatagtaaaataaaaataaatggagtaaatgaagagcatttaagacctgtaatagaaaaattaagagaatgtggtataggattcagcaattacaaagatcattccattgtagtagatggaaggggaagtaagaagccattggatatcaaaacacttccttatccaggatttccaacagatatgcaagctcaaatgatgagtttattatctattgttgagggagttagtgttattacagaaacagttttcgaaaatagatttatgcatgttgctgaattgcagaggatgggagctaacatcaagattgatggaagaactgctataattgaaggcaggccaaaacttacaggttgtgaagttaaagcaactgatttaagggctggggcagcgatggtactaagtggattagtagcagatggtgaaacagtggtaaatgatgtttatcatattgatagaggatatgtaagtattgaagaaaagtttaggagtttaggagcagaaatatatagaataaatatatagattaagatatgaattatgtatatgcataattagggttcgtagttatgaacaaggtataaaaatttttcgtgtaaattttatagaagaatttacatgaaatttaattacctatccctaattatgctttttttattctttaggaatttatattccagtaaaatctgcgggtgagttataggaaagatcaattaagaaagttatggtttatctaaatttgagtagtttaaagttaacataattattaggctaagacaatatactttagagtgcaggctttaggaggtagaatatgaagataattaatgcgaggactacaagtataaagattagcaataatgtgaaaataattgcagctatgactttgatcatttttactatattaatagcattaccaatagctttcttagaaaatggcaaagggaagattgattcgtttaacttgagagacaaagatataatgaagagttcaaaaataacatttccctctaatggtaaagttaagctatatcataggtcagaagatagagttgaggaaatagatttggaagagtatgtaatgggagtagttgcgagtgaagtaccagctaattttgaggaagaagctttgaaggctcaagctgttgcagcaagaacattttatatgagtaaaagaaataaccctaataaagaagaaaaagagaaaggagctgaaatttgtgatacaacccactgccaagtatacatgagtaaggatgagagaatctctaaatggagtaaaagtgaagctgaaagtaattgggagaagatacaaaaagcagttctggatacaaaagggcaagttcttacctatgatggttcagtgttggaataccctcaattttttgcaactagctctggaaaaacagaagatgcaaaagatgtattttctatggatgtaccatatttaaaatcagaggatagtaagggtgaagaaattgcacctaaatataagacaagcacacaaattcctataaacgattttatagataaaattaattctagatataaaggtgttaatgctaataaaagtaatttatcatcattaattaagatattaagctttacagaagctggaagtgtaaaagaaataaaaatagggaatgagactgttaaaggaactgaatttaggacattgttcaatttgaattcgaccaatttcacattagactttcaacaagattctgtaaaagtcaactgtaagggttatggccacggtgtagggatgagccaatggggagctaatgcgatggcaaagagtggatcgaagtatgatgaaattcttaaacattactatagcggagtcgaaattcaagaaataaattacaactaaggagagagtatttacgttaacttagacataggtttggcatacctttatataaataattgaataaatgtaaagaggatacttgtttatttttttatagcaagtatctttttctatttttgtctattaaattagcatggattatatactccaattaattgaatttttgtatatctatgtttaaaaaaagtggagatggacataatttagaacatcactacttaaaacagaaattataaagtagaacttcttaaattagggtctaaatccctgatggatatatctattgtttaataattaaattatatgtactttttaacactagatatacacttgtaaaaataattttaaaatgcctttaaatgtaaataatgcatgataaaaaagcaaatttatgtattatttttcataaaaagggaactataacaattggaggtgttcatattggacaaaaatttaaaagaaaaacttaaaaacttatttaggaaggagggattttatatcgccttattcctatgtctctgtattgtagtaactgttggaactatctcttataaaatgctcaacagcaaaaaccaagttaataaaacagaagacgtaaataaagatctaacaatgaattctggaaatgaaggaaattctaataattcagttcaaaatgctgaaagagtagagaatgttcaaaataatagtaataaagataatgcagataaaacaaaaacagaaaaggctgcatcagtatctacaaataatacagtaacatttgtaaatcctatagatggagtagaaagtagaaaatatacctatcctgcaccagttaagatggaagaaggagttttcagaactattagaggtataaatctacaatcaacagtaggatcagaagtaaaggcagcagcagatggtgtagtggaagttgcagaaaatactggtgttgaagaaggtgttgtagtagaaattaaacatgctaatggcctaaagacaagatatggaaatcttgatgcaaacttatcagtaaaaaaaggagataaggttaaagcaaatcaagttattgcaaaagtaggagatagcgcaaaggtatttagtaaagatgtatttggcgaatttttaaatttacaagtaattgatgctaatggagaacaagttaatccagaaaaatattttaatttaaaatctaaataaaattttatgaaaatatatattagtcatttgtttttcattgaaataaatgactaataaatcaaaaaataaatgacaataaaatgataaaatcaaggaagtggtattttgaaagactatattgaagaaagagttttagatgttgcaagatatatcatagattcaaaagctacaataagaaaaacagctaaggtttttggtgttagcaagagtacaatccataaagatatgacagagagattgttaaaaattaacccagaaattgctcaagaaactcattctattttggaattaaataaggctgaacgacatattagaggtggaaaagctacacaaatgaagtataaaattattgaatcttagtaggattaagtctataatatattattagtagaattatgtaaatataggtattaatatgtattataggagtgaataaaaaatgtgcttttggagaacggggatagacctcgcaattgacttaggaacggcaactgtactagtttacgtaaaaggtaaaggggtaatattaaaagagccctctgttgtagctataaataaaaataataataaattgttggctataggggaagaagcaagaaaaatgataggtagaaccccaggaaatattgttgcagtaagaccattaagagatggagtgatttctgattacgatataacacaaaaaatgctaaaggaatttataaaaaaagcgtgcggaaaaagaagtataagtgcacctaaagtaattgtttgtgtaccatctcaagctacagaagtagaaaagagagctgttattgatgcagctatgaattcaggagcaaaaacagtccatttaattgaggaaccactagcagcagccattggagcaggattagatattaccaagccgaatggatgtatggtagtggatattggcggaggtacttgtgatatcgctgttatttcattaggtggagtggtagaaagagagtcaataaaagtagcaggagacaagttcgatgaagccataataaaatatgtacgtaatgaatataaattaatgataggtgagaaaacagctgaagatttaaaaataaatattggatcagcatttaaaaactctagaaatctaacttgtatgatgaaaggtagaaacctcattacaggattaccagatgaaatagaaattacaacagaagaaatccgaaatgcaataaaagaacctgtggaaataatagttgatactgtaaaaaaggtattagaaagaacaccgcctgaattagcctcggatataatcgaaagaggaatattaatgaccggtgggggagctttaatacatgggttagataaacttatagagtttaagactggcgtagtagcaactatagctgagaattcagttgaatgtgttgcaaatggtacaggtaaagtgcttaattatatagacaaattagatagtcaagttaattctcagcaaatagttcttatagaatagctttataaatagcagtcattagtaattttactactgactgctatttatttggttgactataaaatgcttaaattttaggatattttccgtgacttaaactataggcatcaataaatattttagatataattttagccatatccataatgaatgagagtcttatgctccgtgaaaaaaagaattcagcattatcactagagtctacaatgcctataactgatgcaattcctacctcaggaagttcttttccgactcctttaccaggatgtatggcatagtcccttatacgaatttcaccaatatcatcttcgtcacctaagcaggcatcaacaccaattattgatgcattagggtgattactatatatttcatttaaacgttcatctatgttcaaagcatgaattggagaagataaagttccataaacaggtaaagggaaaaagttttctgtgagtatagatccaactagaggacctaagcaatccccaatacatttgtcagtaccaatacaaactattatggtgtcttttgatataaattttttaacttctaaagctaaatcataataaaatttaggatcaagtttaatatctggcttgctcaagggacatatacctcctttataaaatatatatatgagtaattaacagaagatagtataaaaaaatattttttggaaattaatagtaaatgaggaggtgcctatgaaaaaatttttaatatatttagttttagttcctacaataataataaatatgtattttctgttatattggcaaccgcaagatgaaaattctgcaaaagaagttgttgtacaagaaaatgtttcatattcgaagccattatataaaatgaataaggaaaaggcgttaagtcaattatctacagataataaaaaggaacttgaaaagataataaaaaaattatctgcatttgatataggtaaaataaaagaatattatgaggatactaatgataatgaaagcctaatagaaatatttagtctcttaaaaaagagattaacaacagaagattataagaaaattcaagaaatatcatcttcctttttagatatacaagagattaacaaaagaataaaaaataattaagattactatattaaatgagagtatattgtagaaaatgagagcaatatgaatttaaattacatatatgggtgtatattggagttgaaataaaatcgctttaccgatatactaatcattgttgaccgacaaatgaggcaacaagatataaaaaataaatacggaggaattcccgagaggccaaagggggcagactgtaaatctgttacgtttcgtttcgatggttcgaatccatcttcctccaccaatttataatgggcgcatagctcagctgggagagcacctgccttacaagcagggggtcacaggttcgagccctgttgtgcccaccattataaaaatgctaaatctaattaatatatgctggcatggctcaacggtagagcagctgacttgtaatcagcaggttgtaggttcgattcctattgccagctccaataaaataatacggaggaattcccgagaggccaaagggggcagactgtaaatctgttacgtttcgtttcgatggttcgaatccatcttcctccaccaatttataatgggcgcatagctcagctgggagagcacctgccttacaagcagggggtcacaggttcgagccctgttgtgcccaccattataaaaatgctaaatctaattaatatatgctggcatggctcaacggtagagcagctgacttgtaatcagcaggttgtaggttcgattcctattgccagctccaataaaataatgcggaggaattcccgagaggccaaagggggcagactgtaaatctgttacgtttcgtttcgatggttcgaatccatcttcctccaccaataaagaataaacttaagtttattcttttttattttttatttaaaatgaaaaataaatgatggaaaaagtagattcataatgttgactaattgtaccgcatatgataaaatacttttgaaaattgaattatgttactcttatcaagagaggtggagggaaagggccctgtgaaacccggcaacctgtattatataaggtgccaattcctgtagagtttctacaagataagaaaatgattgctaaattgcgctcttcttatcgaagagcttttttatttttttaagtttgcgcatgcttaaattataaaagaaacaattaataaaatagtttaactattatttattgtatttaaataaggtaaagcttttataaacgagtactattctataaaactatgtatagtttttaataaaataattttattcgtgaagataattataatatttaaatctaaggagagaaaagatatgagaagattatttacttcagaatcagttacagagggacatcctgataaaatgtgtgaccaaatttcagatgctatactagacgctattctatctaaagatccaatggctagagttgcttgtgaaacttgcacaacaacaggtatggttatggtaatgggagagataacaacaaattgttatgttgacattcctaaggtagttagagaaacagtaagagaaattggatatgatagagcaaaatttggatttgactgtgatacatgttcagttcttacatcgatagatgaacaatctgcagatatagctatgggtgtagatgaagcatttgagtcaaaaaaaggtgaaaaagatgaagtagaagcagttggtgctggagaccaaggaatgatgtttggttttgcaactaatgaaactgaagattttatgccgcttccagtatatatggctcataaattatcaagaagacttacagaggtaagaaagaatggtacattaagttacttaagaccagatggtaaaactcaagtaacagttgaatatgaagataatgtgccaaagagaattgatactatagttatatcaacacaacatgatgagaaagttactttagagcaaattcaggaagatcttaagaagtttgttatagatgctgttgtaccagcagaattattggacagtgagacaagatatttcataaatccaactggaagattcgttgttggaggacctcaaggggattcaggattaacaggaagaaagataatagttgatacttatggtggatatggcagacacggtggtggagctttctcaggtaaagatccaactaaagttgatagatcagctgcatatgctgcaagatgggttgctaagaatttagttgcagctggtgttgcagataagctagaaattcaattagcatatgcaattggtgttgcaaagccagtttcaattgaagttgaaacatttggaacaggaaaagtagatgaagataagattgttgaagtagtagagaaagtatttgatttaagaccaggagctataattagagatcttgacttaagaagacctatctataagcaaactgctgcatatggacattttggaagaaatgatcttaacttaccatgggaacaattaaataaagtagatgaaataagaaaaaatctataagataattcttaagtgaatttttattatcaagatttgtatatataataaaagtttttgtagaatggtaaaaagtcgtcttaaatatagacggctttttattatggagaaatttataattatatatttgaatagtatatatagaaatttaatggattgagtgctcaactaaaattaaaatttataacttaattgcaaaacagataagcatttaaaatctgagtattttagaatttattaaatatttatagttttattttgtatactccatttaaaagttattttatgcagggaagaataagaaaagattatgagttataagtgattagttttaaattcggtataaatatttatgatataattataagaaaaaattaaagttaaatctgacgctaaattttaattttagaaagtttaaggtaaatatataaagatttggagagattctatatggaagttctaaatggatttgttgagaatattgtttttaaaagtgaagatactggttatgtcgtttgtaggattagaaacgaaaagacattaattagtgctgtaggcacagtgcctttcttaaaagaggggcaaaatgtaaagttaacaggatactggacagtacacaaacaatttggtaatcaatttaatattcaggattatgaagaacttcttccaaattcattagatggcatagaaaaatatttaagtgcaggaataatacatggaattggaccggttacagctaagaaaataatagagagatttggtgaagaaactctagatataatggaaaaccatattgaaaggcttatggagatagagggtataggagaaaagaaatttcaaataatatatgaatcctatatagagcaacagggtttaaaagatataatcttatattttcataaacatggggtcactaataatcagtgtgtaaaaatatataagaaatttggtccaaatgcgaggcagatagtatctgataatccatatatattatgcgatgaaatatcaggaattgggtttaaaacagctgatagaattgctatgagcattggcattgaaaagaattcggattttagaattcaaagtggaattaaatatgttatgaatcaattttgttctgcaggaaacacatttatgcctaaaaataatataatagaagaatgcgaaaataatttattaatatctaaggaactaattgaaaaaaatatatatgacatggctgcgcaacaaaaaattattgttgaaaacataaatggtactgaagtgggatttttacttcaatattattattgcgaactaggtgttactagtaaaataataactttagggttacagcaaattcagactataaattcagatgttgatttcgaaattaatgttttcgaaaaagaacaaaatataaaatttgcagaatcacaaagagaagcaattattggcgcatttaataatgggatagagataattactggtggtccaggaacagggaagactactattataaaagcaataatacatatatatgagaacaatggaatgaaagtaatacttggggcaccaacaggaagagcagcaaagaggatgactgaatcaacggggagagaagctaaaacaatacatagactattagaaatgggaatttctgaggatgatgaatcagtatttgaaaaaggggaatcatcacctctagattgtgatgtaataataattgatgaggcttctatgattgacattatcttaatgcagaatctactaaaagcaattaatttaggaactaggttgataattgtgggagatgttgatcaattaccttctgttggaccaggaaatgtgctaaaagatcttatagaaagcgattatataaaggtagtaagattaaaagagatatttagacaaggatcagaaagtttaattgtagtaaatgctcatagaataaatgagggacagatgcctttgttaaatcaaaaggatagagattttttcttcattagcgaagataatcaagaaagaattgcaaatactataatggatctaataaatagaagacttcctaagtttaataagtcttggaataaactgaaggatatgcaggttttaactcctatgagaaaaggtgtgcttggagtcacaaatttaaatacgaagcttcaagaaatgtttaatgcggcatcaaaagataaaaaagaaaagacttctcgagatataattttcagagaaggtgataaggtaatgcaaacaaaaaacaattatacattaaagtggattagggttagtggttatggcgaaaatgaaggagtgggagtttttaatggtgatttgggattcatagaaagcatagatgaagaaaggaaaacacttacaatcatatttgatgaggaaagaaaagttatatatgattttaattttttagatgagttggatttggcttatgctactacaatacataaaagccaaggaagtgaatttaaggttgtaataattccggtatttatgggatcgccatttcttatgaatcgtaatttgctttatacaggtattacgagggcaaaacaattagtagttgttgttgggtttcaaaaagcattaatgtatatgattaataatacaaatagtatagaaagatactcatctttgaaatatagaataagagagataataaccaaagatgaattcgaagaataagagaaaggagataggtgtatgaggaatttatgtaaagtaactttagaagatttaaagtatgcatttgataagatagattattggtataagaaaaatattaaatttttaacagtaataacagttccatttaatacatcgtgtgttttttcaaagataataagtaaagtttcacaaaataatgggaaggtcttatatgtatggggaaaagaaggtgaaaataaggaattagtaaatataacaagagaaatgtattctgatataactcattcatatattgtaaaagaaatttcaaatactaaacttacttttgcacactataataacctggctaagatcaagcagaactatgatttagttatttttgatgatataacatatttctctaatctaagcaatgtaaatgtaagagagatgttagagatgtgttcaaatataggagaaagagttttgttatatagcatagaaaagacggctttagtaggagaaaaattcgagcttgcagcatataattataaaaagccatttgtagaacctagggtgctaactacgcgaatagatttgaattcagatattccattttctctatatgactatcttaaatggttcagggaaaatagtcataaggtggctatttatgtgcctaataaagagaagcttgacatagtatatgattatttttgcaataagctaaaactttcaaatgtgaaagtaataaaagcttcagggaatgatgatataaaaaagagtgaaaaagtatcaaaatataaggataaggcaatatttataataactaataaaatagaggagttacttgaatattgctatatggatgatgcagtagtactttttgctgataatgaaagatatacttataaaaagcttttgtatatatgtggccaaataagaaatgtaaatctaaaattaccagaggttcttttggtatcaaacgatatatcagaagatattgagaaggcgaagaatatggcaagagatttcaataaaaaagtatgggaaaagcgtttaatagaattataagaaggatattagaaggattaattgaagtaatatatccaagggaaaattattgcattatatgtaaagaagataactgctttggtatatgtgagcactgtaggaaaagtataaaaacaatagcagattcatatcaagatgaaataataagttatgggtattatggaggcgtattaaaagatttaatacttaaatttaaatataaaagcaattttacagcaggagatatattagcagaatttttagaagaatatattataagaaacttgaaatatcaggagtatgtaataacttatataccactatcaaaaaaatctaaaaagattaggggatttaatcagtgtgagtatatagcgaagaaaatagctaaggatttatcaattgaagttctagaaattttgataaaggataaggaaacaaaagaacagaaaagattaaagaaggacgaaagatatgagaatataaaggatgctttcaaaataaaaaaaagattagaaattaggaaatataatattatattggtagatgatgtaacaactacaggtgcaactcttaaagaagcttataaattattaagaaaatatcaagtaaaagacataaaactcttgaccttagctaaaagtcatatataatattaatgtaaagctaggtttgtggttgaaagtcgaagctagtcgcaggcaaaacgatccacgtaatttagacaaaatgtctaaggagcatggtgcggtatagaagtaagtcctgccagattgtattctgagagggttagtagtgagggattaaattctattagcaaaagctccagcaggcgagtgtggggtcaaaaaccaggtcaactagctttacctctatttattttaaaattatcattaataggaaatgtgaggaatctaatctaaagtttgcgattagatttattttttgtctttagttttcagaatttactgataattctcttgttaagttaataaaaaagtgatagaatattaataacttaaagatattaagtttaaaaactttttcatatgagaggggctggaatttatgaaagtcacagttatagcaaaaaatatggaactaacagatgcgctaaaagaaatagtgcaaaaaaagataagcaaattggaaaagtattttgaaatgaatgtagaagctaaggctacactaagtgttcaaaaaaataggcataaaatagaagttatgattccttttaatggagtagtattaagaggcgaagaatcaacttccgatatgtataaatctcttgacttagtggaagataaattagaaagacaaattagaaaacaaaaaactagattatctagaaaacatagtgggtcattgagatttggagaaataaataatatagatattaagccatcagaagaggaagaaggtaaattggttaaggtaaagaaatttggggtaaaaccaatgaattctgaagaggcaattcttcaaatggatttattaggacataatttctttgtatatcaagatgcagatagtagtaaagtaaatgtaatttataagagaaaagatggggattatggtttgttagaaccagaattcatataacatataagagattttaataatggctgtccaatgtgcttatttaatttgcatcattggacagttatttttcatatcaaataattgaatagatgatgacaatatttttacataaaattttcaattaatattaataatttgtgattaaaatattaaaaaaaagttaaaattgggtgctttatataggatttaatacaaaaatcatgagttttattgaaaataagataagtaaaatgttataattataaaatacgtgatttataaaataaattacagattatgaattatggatagttaaaatatattggaaattaacgtgaaatatataatttcgaaaggatgacattatgggactattaaatgccgtatttggaacatatagtgaaagagaagttaaaaggctcaaacctactatacaaaaaataaatgatctagatgaagagctgcaaaagttttctgatgaggagttaaaggcaaaaactccagcgtttaaagaaagattagcaaatggtgaaacattagatgatattttgccagaagcattcgcagttgtaagagaagcttcaaaaagagttttaggaatgaagcactacgatgaacaacttatgggtggtatgatacttcaccaaggcagaatatcagaaatgaaaacaggtgaaggtaaaactctagttgctactttaccagcgtacttaaatgggttaagtggaaatggtgttcacatagtaacagttaacgactatcttgcaaaaagagatgctgagcagatgggtgagttatatggtttcttaggattgactacaggtgttattgtacatgaattaaataatgatcaaagaagagaatcatatgcgtcagatatcacttatggaactaataatgaatttggatttgactacttaagagataacatggttatttacaaagaggaaagagttcaaagaccattaaattttgctatagtcgatgaagttgactcaatattaatagatgaagctagaactccgcttataatttcaggtcaaggtgaaaaatctactgaattttataaagttgcagactattttgcaaagaagttagttgcagagaaagattttactagagatgaaaaagcaaatgcagtaatgttaactgatgaaggtgttagaaaagcagaagtaacctttaaagtagccaattatgcagatgctgaaaatattgaattacaacactatgtaactcaagcgttaaaagcaaactttgctatgagaagagacaaagattacatggttaaagatggcgaagtaataattgttgatgaatttacaggaagacttatggagggaagaaggtattcagatggtcttcatcaagcgatagaagctaaagaaggagttaaaatcgctagagaatcaaaaactttggctactataacattccaaaactattttagaatgtataaaaagttatcaggtatgactggtactgcattaacagaagaaaatgaatttagagaaatttacgggctagatgttattgttataccaacacatagaccaatagcaagaaaggataatccagacttagtatttagcacagagcttggaaaaataaaggcagttgcttcagaggttgaaaaagctcatgctaaagggcaaccagtgttagttggtacagtaagtattgaaaagtcagaacttgtatcaagtatgcttaagaaaaaaggagtaccacatcaagtattaaatgctaaattccatgaacaagaagctgaaataataagtcatgctggtgaaaagggcatggttactatagctactaatatggcaggtagaggtactgatatcaagcttggcgaaggtgtagttgaacttggtggtcttaaaataataggtactgaaagacatgaatcaagaagaatagataaccagttaagaggacgttcaggaagacaaggagatccaggtgaatcaacattctttatttccttagaagatgatctaatgagaatattcggatcagagaagattcaaggtgttgttgaaaaattaggacttcaagaagaagaagcaattgaaagtaaaatggtttcaaaagctattgagaatgctcaaaagaaggttgaaggtaataactttgatattagaaaacaattattgggttatgacgatgtaatgaatatccaaagagaagttatctacaaacaaagatcagaagttcttgaaggcgaagatgtaaaagaagaaatattatcaatgacaaaggatattattgctgaagctgttaatacttatgttacaggtgaatcagaagattatagagaagaattcttgcatctaatggttgctttacaagatatatgtatagctccaggtacagttaatttacctagtcttgaaaatctgtcaaatgaggaaataatcgaaagcttatttgaatcagcacgtaagttctatgaacaaaaggaagaagagtttggtgcagaaagattaagagaagttgaaagagttgttcttttaagagctgttgatactaaatggatgaatcatatagataatatggatcatttaaaacaaggtatagggcttcaatcattcaaacaaattgatccagttcaagcgtaccaaatggaaggtagcgaaatgtttaatgatatgattaaagcaatcaaagaagaaacagttaggctgttattccatgttagaatagaagttgcaccagaaagagtaagagttgctcaagaaactgaagcaattcatgcggaatcttcaagtgctgcggctccagggccagggcaaaatcaaccaggtggacctggtgcagggccagtagctccagttagaaatctagataagcatggaagaaatgaattatgcccatgtggtagtggtaaaaaatttaaaaattgttgtggaagagaagcataaacaagtttgaaattttgtaataagctctaaagagtttgaaaaatgataaatatgatataataaattccgtagaggtttgaagaattgttatttagaattaaatacagttttaagaaggcttctgcggaattcttattaatattggattttttgaaagaggtgaataatagatgataattgaacttgaaaaggaattggttaaacttccaggtataaaaaaatctatagaagaaatgggggcttcactttgaccgagataggttagaaaaggagctcaatgagttagaatatcaaatgcaagaatcaggtttctgggataatataaaaaaggcagaagaagttacaaaaaagagtaagttgataaaagacaaaattgaaaatttcgataagctcaagtctcagattgaggatatagaagtactaaaagaaatcatggaagatgatgatgaagaatctgctaatgaaataatacaaactttaagagatatagaagcacagattgatgactataatatgaaagtactactatgcggagaatatgataaaaacaatgccatattgacgcttcacgttggggtgggaggtactgatgctaatgattggacagaaatgcttttaagaatgtatacaagatggtgtgaaaaacaaggctatagtattgaaactctagatttacttcctggagatgaggctggaattaaaagtgttactttaaaagttactggggaatatgcatatggttacttaaaagcggagaaaggtattcacagactggttagaatatcaccatataacgctaatggcaaaagacaaacatcatttgcatctatggaagttcttccagaacttacaaaggaacaggatatagaaataagatctgatgatttaaagatagatacttatagatcaggaggagctggaggccagcatgttaataaaacggactcagcagttaggataactcatattccaactggaatagtagtacagtgccaaaatgaaagaagtcaattttctaacagggatacagctatggaaatgctaaaatctaaactagttgaactaaaagaaagagcacataaagaaaaaattgaggatttaaccggagaattaaaagatatgggatggggaagtcaaataagatcatacgtatttcatccatacagcatggttaaagatcatagaactaatgtcgaaacatcaaatgttacatcagtaatggatggtgagattgatatgtttataaatgcatatctaaagcaacaataaaaagaatatatattctcttaatgaaaaaggcttctatctaaatgattttatgatagaagtctttttgttaagagaaattctaaaagtaaagtttatataaaataaatagtaaaaataaactggcatatctgtatagttaagcagctttatagaatatatcgattaaagaatagacggcaataagaattatgcacacatatagggaaatattaagtccaggttttagtatagacatgattcctccaactaccaatgctgtcattattactacactaacaaatttaaaaaaacctgatttgtttgttagaagagttgtgacagacgaaaacataatcaaaattaatactagaaagtaaaatatattttttaagttaactgagtaactcattatttgaaattcgtttaaagcaagtattgagagtaaaaataataatgagaaagagcaaattctactaatatttttaaccataaacccatcactcctggtaattatttacataataattataccgttagatctttattcaatcaataacaaatttatataaaataagtattcttatatgattagcatataatatcagaattaataattgaaattaattcctaaaatggtatataaatatgataaaatatattcatattaatggaggagttgaatttatgaatattctaatagttgaggatgaaagggatattagaaatcttatttcattgcatatgagaaaggaaaactatgaagtttatgaagcttccgatggacgagaagctttaaatatatttgaaaatgaaaaaatagatttaattttattagatataatgatgccaaatgttgatgggatttcagtgatacaaaaggtacgagccatctctactattcctataatttgtattacagcgatggggaacgattctgataaagttttggctttaggacttggagctgatgattatctagtaaagcctataagtccaattgaattatctgcaagagtggcatctaatcttagaagatgttacaaatatgctgagcataaggacataatttattcgacaggagaattaaaactatttactgagacttttgaagtttataaggggaacagaaagattgatctaaatccaaaggaattcaaaattttaaagttattagtttcaaatttagggaaagtatttactaagaaacaaatatatgaagaagtatgggaagaagcttattttggcgactctaataatataatggttcatttaagccacattagagagaaaatagaggatgatcctaagaatccaatctacataaaaaccataagagggataggttataaaattgagagggttgcaatgcatgaaagctaaaagaataaaaaggagtgttacaacagagttattttttatatattttttgggatatatagctataaacataatactattaatagcgattattggctcaattgttgtttatggaactttatgcggacctaatacatataattcttattttggagggctacaaaataagcttgtaaaagattatacgagtataacggatggggatttatctgatatagatggttttatggtaaaaataaataacgagaataaagttctttacatgaggggacatgttatcgaggaatttaaaaatataaatttgcaaagctatatgtatttatttggattaacaaaggataatgaagaatcactaaatgatgatattagaacaatgtttgcattatcagatttcaataattcaataattgaaacaaaagataatgttaaatattcactatatagcaagtatctaaaagaagaggattctttagtggtagttggcttcccgtattcagagattacaaagccgaatagaatcaccaaagtaattcctcataatctaataataaaaataatgggtgcgtttaatgttctattaattctctcgatagtgtatattttagctaaagcaacttctagcgcatttataaaaccaataaagacattattggctggagtaatagagatatctcatggcaattataatatacgtttagatatagataaaaagaatgaatttcttgaattagcaaatggatttaatatgatggcaggaactatacaaaatgaaaaaagtcaaaaggaaaaattacagaagataaaagaggatttaatattagatatatcgcatgatttaaaaaaccctctttcatcaattttaggatatagtgagattttaattaataataatgatttagatgaaaaggaaaagttagaatacttaaacataataaataagaattcacaaagagcaaataaattaataacagacttgtttgaattttcattatatgataattctgattataaaatgattaccgtaaaagcagatatagctgaatttgttagacaaataatagcaaactatattccggaatttgatcataaaaaattcgaatatgattttgagataattgaagagccctattatgtaatgataaatgaagaaaagttatctagagctataaataatgttttggacaataaagttaaatacaatcctgtaggaagtagaataggagtaaagacagaagtgagagagaattatttctacattatattatcagataacggtgaatgtattcctcaaaaatacagagaaaatatatttaacccatttgttagagttgataaatcaagaaactcaaaactggaggaacaggacttggattatctattacaaagaaaatattaaataaacataatggtgatattagaattatagatagtggaatagggacaacttttgagatcatgttgccacttgttgtgtttaagaataaaatctaaatttaaagcttggattagcaatttatttttctgtacttattcaataaaaattggaggggtaaatatgtattttaatataccaggaacaaaagatattcttattaaaaacttaacaggtgaagacttaagggatatatatttaagctttgagggaattgaaaaacatccattaaagatatccaatataagaaaggatgggcaagtagttaagactttagttttaagctatttgaataaagcaacagagcttaaactctgctattataacgatgggcaaaaacaagaaatcgtagtatataatgaattgagcaaaaaggatttaagaaaattaattcttgagattagtaaggaaaatgggaaactgaagtgaggacaactgcagaagaaaaatatatataattattgctttcaattaaaataagtttataatattaatagtgatataggattattgccattactaaaaatagtaatggcaataatgatttatatggtaaaatagtattgttgtggcaatgactatttaggtaatttaatataagcaggaggaaattatgaattcaattgaagaaagaatcgcaaaagaattagaaataaaattaagtcaggttcaaaatgttattggacttttagatgatggaaatacagttccatttatttcaagatatagaaaagaagcaacaggaggactttcagatgaagtcttaagaaaattatctgaaagacttacttatctaagaaatttagaggaaagaaaagctgatgttacaaggcttataaaagaacaagaaaaatatactgacgaaataggaaaagctttagaaagtgcaacgaccttaacagaagttgaagatatatatagaccttttaaacctaaaaagagaacaaaggcaacaatagcagtagaaaagggattaaagcctcttgcagaactaattttggaaggaaaattcagtggggacttagatgaagaggcggctaagtatataagtgaagaaaagggagttacaaatagccaagaagctattcaaggagctttagatataatagctgaaagcatttctgatgaagctaagtacagaaagtatataagagaatttgttattagagaaggtaatatagaatcaaagggaagttcagatgagccaactccatatgaaatgtattatgaatattctgaagcagtaaataagataccacctcatagaatattagctataaacagaggggaaaaagaaaaaatcctaaatgttaagataactgttaatgaagataagataattcaatacttagaaaatcaagtattaaaaggtaatgaaactttagatgaaaaattaaaacttgcaattagagattcgttaaaaagattaatttatccatctatagaaagagagataagaagtgaattaactgatataggtgaagaaggtgctattaagatatttaaagaaaacttgaaagcattgttattacaagcgcctattaaaggaaaagtagtaatgggatatgatccaggatttagaactggttgtaaaatagcgattctagatgcaacaggaaaatttttggaaaatacagcagtatatcctacagtgcctaaaagagatatcgaaggaacgaagaaaactttaaaagctcttattgctaaacataatgttgatgttatatcccttggaaatggtacagcatcaagagaatcagaagaagttattgctgaaatgattacggagataaaaaatgaaactggaaaagaattagcatatgtaatagtatctgaagcaggagcgtcggtttattcagcatcagagcttgcaactaaggaatatccagatttagatgttacagtaagaggagcaatttcaataggaagaaggctgcaagatccacttgcggaactagttaagatagatcctaaggctataggagtaggacaatatcaacatgatgttactcctaaaaagttagaagaatctttagcaggtgtagtagaggactcagttaacactgttggagttgacttaaatatagcaacaccatcgcttttaacacatatttcgggaataaatgcatctatcgctaaaaatattgttgactatagagaagaagttggaagattcacttcaagaaaagaactattaaaagttaagagattaggtcaaaaggcttatgagcaatgtgctggatttttaagagttgatgatagcaaagaacctttggataatacatctgtgcatccagagtcttatgatatagctaagaagctaatagaaatacttggttacaataaagaagaccttaagaataataaattaggggacattgatgaaagagctcaatcccaaggattaaaaaaattaagtgaaacattggaagttggggaaatgactctaaaggatataataaaagaattaaagaagccaggcagagaccctagagaagaaatgccaaagccaatactaaaaacgggaataatagaacttaaagacttaaaacctgggatggttttagctggaactgttagaaatgtatcggattttggagcatttgtagatataggagtgcatcaagatggattagttcacaaaagtcaaatggcaaatagatttgtaaagcatcctttagatatagttaaagttggagatatagtgaaggtagcgatattagaagttgatgaaaagagaaagagaatatcattaactatgaaagatattgatgaatcagcagaagtatagttaacataataaatcaaatttaaagtcttaagagtatgggtatgtttattcttaagacttttctgcttacaaactttttataggcagaaatatatgattgtatactaataattgtttaatacattctaagtattgcggatatttttgtactagcgattagcgtgtatgaatggagagtatgatatagtaatatagaatagtatttttaataaataaagatgaataaaattgtaggtttataataaggaggaaaagtaatgattagatggggaattataggacttggaaatatagctttgagatttgcaaagagtttatcatattctaatgaaggtaaactgtatgctatagcatctagaactaaggaaaaacgtgatgaattttatgacaagtataattgtgagaaagtttatgaaaattataatgaattattaagagatgaagaagtggatgctgtatatatagcattacctcacggctttcataaacactggtccatcgaagctttaaggcataaaaaggctgtgttgtgtgagaaacccgtagggataaattcagaagaaatggtagaaataaagaaagaagctttactaaatagtacattctttatggaagctatgaagacaagatttattccgataattagtgatattaagaaaataataagaaataaagagatcggagatataacggctatagaagctaacttttgcaataatgtagaaaacattaaaccgggatcgtatttattagacaaggaacaaggtggggcgctacttgatgtaggaatttatccattgtcatttgtaatggatatgattaattcagaagttataaatgttaagtcttacatggatataaatgaatcaggagtcgattcctattttaaagcaatactttcttttgaagatggagtaataggaactgtagaaggggcaattgatagaaataaagaaaggacagctattattagaggaacaaagggatggatggagattccgatgtataatagaccgaacaaagctgttgttaatctaaattcgggcaagtcatatacaattgaaaaagatatagaatttgatgacatgtatgcagagattaaagaagttcataactgtttaaaagagtcaaagcttgaaagtgattatttaactttaaatgaatcaattcgggttatggaagtattagatagaattagaatgaatgcggaataaaaaagtgatttgatgaactacttacaatgattaggcgggagagagaaacatataaaatggatgaagtaaaagtttatactaacagaaaaaatattgtacttttagcaacattatgttgctttttatggggaagtgcatatccggctataaaagttggatattcactattcaatataagtgacataggctctaaattaatttttgcaggatataggtttacacttgcaggtatttttatacttatatttgagcttatatcaaaaagagttatatttaaatttactagaaagcaatttgggcagataaccttattagggttaactcaaactgcacttcaatatatattcttttacgttggaatgtcatatactacaggggttagaggatctataataaatggaacaggaacttttgtaagtataattctagctcattttatatataagaatgataggttaaatttaaataagataataggatgcgttattggatttataggagtagtaattgttaacttaaatggagaatcattaggaggaacatctgtcacttttaaaggtgaggggtttataatgattgccgcaataatatttgctgtgtcagcaatatatgggaagaagataactcaaactcaagaaccctcaatagtaactggctttcagttgtttataggaggaattcttcttacagcgctaggatttacattgggaggtagcttagaaggatttacagcgaaatcaacatcactacttatatatatggcattactatcatcaatagcctttgctgtttggacacaattattaaaatataacaaagtaggattaatatcagtatttaattttttaataccggtatttggaacattgctatcagcatcaatcttaggtgaaaatatatttgatattaagatattaatagcgcttattttagtttgttatggaatatttctagtttatagagttaagaaggaaaattagaatgaaaatattgtacataacatatattttgtaagaaaatcttttgaaaaattatatattacacgaatgagaataatattaaggtaagtggagattttcatgaagtgtatatccttcctcaagtaaatgaagatggaaaagagaatactttgatgaagcttgagataatgaaaaaggagaattaacatatgttaaaagaaattcatgataaactgattgctcttacagacgaagaattaagcattttaagtggagagaattctgtagatagaagcatttacacagatgatggaaatttcattgtagatagcaataaactactaccgagtggggagctaatagatattagaaagcatattagatttattaattttccgagtcataatcataattatattgagtttaattatgtttatcaaggtaagcttactcaaataatagataacaatgaaataactttacaaaagggcgaattaattttcttaaatcaatatataactcatgagataaaagcatcagacaaagaggacataattattaactttataattagacctgaattttttgactatataataactctgttagataaagaaaatatagtaagtaaatttttactaactacattatatacagattatgatgaaggagaatatctatattttaaagtttctgaaagaaaaaacattcaagagctattagaaaaaataataattgagctgtatactaattcgataatgaaaaaagcgacaataaaattgttagtagggcttttattagtagagttagtaaagaattcacaggatatagagacatattctgtggataactatgagaagatgttgataattcagagtcttaaatacatagaggaattttatagcgcagctactctgctagaactctcagaaaaattaaatcaaccagattataaacttagcaaattaataaagaaacatactaaaatgacttttaaagaattattgcaagaaaaaaagttaagcaaagcagttgagttaatcaaattaactgagtattcgattgttgaaataattgagtttgtaggatatgagaatccaacatacttttataagatattcaagaaaaaatttggaatgacgcctagggaatataaaatgaacagaattaataatttaagaataaagaagtgatcttgatgaaaagttgagagagcttttttattaataattgagatgttttgaagttaattactttgaattgaaagaggtttgacattatgctatgattattttagtaaacgttattttggtaagtattagggcatagagtttgggtgaattaaattttaagtataataatgagaggtgtagagatgagatatttagtgttagatgtaggtggaagttcgattaagtatgcactgatgacagaggatttggagtttattgaaaagggtaaaaaaccaacaccacttgataaaattgaaagttttatagatgtaataggtgaaatctatgatatatataaagatgatatagaaggaatagctataagtatgccaggtgtattagatagtgaaaaaggttatgcttatacaggtggtgcactatcgtataatgaaggtaaagagattgtaaaaattcttaaagaaagatgtccgataaagattacaatagagaatgatggaaaatgtgcagctttagcagaggtttggaaaggaagtttaaaagatttcgatgatggagttgtaatagtactaggaacaggtgtgggtggaggaatagttcgaaataagaaaatccataaaggaaaaaacttctttgcaggtgagtttagctttataaatacaaatgtaaataatactgagaacacggatgagtgttggggatctataagtggttctaaagcattgataaatgaagttgcaaaggtaaaaagtcttccgccagatgaattagatgggtataaaatatttgaatatgcaaataataacgatccagatattcttaaaattttagatgatttcacttataagctagcggtacaaatttttaatttacagtgcatattagatccagaaatatttgcaattggtggagggataagtagtcaagagatattgatacaatatattaagaagaatgtggacaagtatcagaagagttttgaaattgatgatttaccaatacctaatgtagttagctgtaagtttagaaatgatgctaatctcataggagcactatacaattttataactagcaaataaaatataattgtattaaatgctaattatattttctagaagggtatcattagtatttagcttttctaataataacattatataaattaacttagtaataatatataaaatggagtgattctttttagaatcactccattttgtataaagattttatattaaacgttgaataacatatcactataagttggaattggccagaattcttcgtctactagagtttctaacttatcagcatcagctcttaaagtattcatttgttcaaatacttcatatctatacatcattcctaaatcgaatatatctccagcgaagttatcagctttttcaactaatttttcaagaagagcaacattcttatttaatgaagctgttaatgttgaaacctcagttaataattcagtttgaactgatatgtctgcattcacaccagtagcctttatagtattaattgattctgcaagacttgtagcaaacttaattacagcaggtaaaatttgacgttttgccatttcaagtgttgttaaagcttcaatatttataatcttattgtagttttctaaagtgatttcataacgagatgttgattctactctagttaaaactccatgcttttctaatacagcttgattcttttcatccatcatagctttagcagcttctacagttgagtggatatttggaagccctcttctttctgcttcagcaacccattcatctgaatatccgttaccgttgaatatgattctcttatggtttttaacgatatttgttaagattgattgaatttcagtatctaaatcagtagctttttcaagtttatctgcaatttcagataaagtttcagcaactatagtatttaatacaaagttacatccagcaattgaagcagaagatggaaccattctaaattcaaatttatttccagtaaacgcaaatggagaagttctgtttctatcagttgcatcctttggaagtggaggtaatgtatttactccaatagttaattcacttgcagacttagaacttgtagctggacccttttcaatttgttctaatacatcctctaattgatcgcctaagaagatagagattatagcaggaggagcttcgttagcacctaatctatgatcatttccagcattagcagctgatactcttaataagcttggatattcatcaacagcttttattacagcacaaaggaataaaaggaattgttgattttcgtgtggagatttacctggttcaagaagattcattccatcatctgtacccattgaccagttattgtgtttacctgacccgtttacgccagcgaatggtttttcatgaagcaagcaatataaatcatgttttgcagcaactttcttcattatttccattgtaagttggttatggtcagttgatatatttgttgtgctaaatattggagctaactcatgttgagcaggagcaacttcgttatgcttagttttagctaatattccaagcttccaaagttcttcgtctacttctttcatgaaatcagaaattctttgtttgattgttccgaagtaatgatcttcaagttcttgaccctttgaaggttttgctccgaataatgttcttcctgttaagataaggtctttacgagcatcatacattgacttatcgattaggaagtattcttgttcaggaccaacagttgtaattactcttttagtagtagtattacctaatgcttttaaaacacgtaaagcttgtttgtttaaagcttccattgaacgtaataatggagttttcttatctaaagcttctccgttataagaacagaatgcagttggtatacataaagaaccatcttttatgaatgctggtgaagtacaatcccatgcagtatatcctctagcttcaaaagtagctctaagtcctcctgaagggaatgaagatgcatctggctcacctttaattaattcttttcctgagaattctaatataacttttccgtcagaagttggatttataaaagaatcatgcttttcagcagtaattccagtcataggttggaaccagtgagtaaagtgagtagcgcctttttcaacagcccaatctttcattgcagctgcaacaacatctgctacatctggttcaagagtagttcctttttcaatcgtcttttttaaagctttgtaagtagctttaggaagacgttctttcattacagcatcgctgaatacatttgaagcaaaaatttcattgattttgttcattaataagatcccctttcagaatacacaacatttatttaaattaatattaactaattaaaaacattaataatttaaaaaaaattttagagtataaatgataaattgtcaacaagaaataagaaattgccacatatagactcctaccatataaattcagatatggtaaaaaatgcatattaaaaaataaaaagctaaagaattattttaatattctctagctcctttgctaaaatcttattcaattaataaattaaacatagttaatatataacactgctaagactgccatagccttaagtattttctataataattatactatattgttgtaggttgtacaatacaaaaatccgattttttgcagtaagaaattagtagaaatttaaatatttatattatatttttactgattttaatataagaattataattaaaaaaattattctgatatggctttattcatagaagatatattattaaggtatatagattcaaaataacataattgattttttataaaattctttggttattttgaatttaattttatggtaatatattaagtaacaaaggttctagtctgattaaatacattagtttttatatggagatgaaaagtatgttcaggtatgttagtgacataagcatgatttccaactatataattaaagaatttttgcaaaataggagtgtcgcaatagatgcgacattgggaaatggctatgatactgattttcttctgccttaccttaaagtactgcctaaatcaaaatttggagttatgtactatagttttttatagaagtgaagaaacacctattctaattgtaacagaaaaaataatattgcgaaaaggaagagtattatggaaaatgtatattactatgacactaaaattggcaaaataagcatagtggaaaatgggacagcaattacaaagatttgtttcataaacaaagatgaacttaatatagaaggaaatgaaacagagttactacgaaaagctataaaacaattggaagagttttttgaaggagagcgaaattgttttgatttaccattagcgcctaaggggacggagtttcaaagaaaagtatggagtgctctacaagagatcccttttggagaaacaaggagttatggtgaaattgccaaaatagtaggtaatgaaaaagcagcgagagctgttggtatggctaataataaaaatccaattccaattataataccttgtcatagagtgattggtgctaatggtaaattggttggatacgctggtggtcttaatacaaaggaaaagcttcttaaaattgagaaggattataaaatataacttgaaaaataatataatttaataatattaataatataggtgagcgagtctttataaatagtaaactatttgtagagatttgctttttttacttacgataaacaaataacattgcttcaagtaaattgacaattctttaaataattagtatataaatgaattttgaggggtcttaaaagcaaagaatttaataattgttttatgataaaagtaattattatagaaagtattttagacgaataacgattgaagtgcttataagtgttgaaaagataattaaatatgcttataattacttataaggggtggttttatgattgggaaagaaggctgtgaaaattttaataaagacaatatattttcatataaggagaggttgaaattaaatgttaatgaaaaaactaagattgttgaaaaggcaatgaaatttatccataacaataaaacatatttttttgatgtttctactagtattgaatttctttcaagatcattagataaaaaagtaaccatatttactcattccatagataattttaatatactttcggaaaagagtggtatggtagtaaatttgattgatggaaaatttaataagaaaaatcgcttcttctatagaagaaattatgatgagtatttcagcggagttgagtttgaagcagcatttataggtgctggagctataaaaggtaacggtatttattatgaaaatgaagaagacgcttatattaaaggggagattgtgaaaagggctaagaaggttattttacttgccgaacatcaaaagtatgaaaaagatgccttttataaagggttaaacctagatcaggtagatattattattgttgatccaatctcggtttcttcttttagtgatattatggaattgcataatattaaaattaatcctaaaagtctagtgattatataaagaaaacatattaatttaagtagtgttatttaagagaataaaattgagttttatttgtttataagtattcaatgcgataagtaattataagcaattgaatgttttattataaatagttaggggatgagtcaatgaaaaaaattagaatggtctgcttggatattgatggaactttgttaaattcaaatcatgaagtaactgaaaaggtgaaaagtactataaataaagttgcaaatgataagaaaatacctgtaattttagtttcagctagaatgccgaaagggataagatttcttcaagaagaacttggaatagaggaaccgattatatgctatagtggtgctttaatcttagataaagataatagtgtattggctagagaagtaattgatgtttctaatttcgaggaaatatataagttaacaagtgaaaataacattcatatgagtttatacaaggatgatgaatggtatatagaaaaattagattattgggctaaacaagaaagcgaaataactaacatcattcctaatattattgattttaataagttaatagaacaatggaaaagagaaggggtaggaccaagtaagattttatgtatgtctaatccaaaagaaataaacttcttgaaagaaaatatttatgggaatgatttaaatatatatccttcaaagccaacatacttagaaattatgcctatacaagcatcaaaaacatctgcaatcacctgcttacaaaaaaaattcagtatagataaatcagaaataatagcaatgggagacaattataacgacattgatatgttagagtatgcaggagttggagtagcgatgggaaatgctccagaagatgtgaagagacatgctgatgatgtaaccttaactaatgatgaagatggggtagcagaagcactgataaaatatgttatcaacaagaaataaagaaaatgttttgtggctgttttatttagaactttcataaagtgcttttttagagatgtgtaagcatagataataaggtaagcgtaaaaaaattaacggatagaaaatgcaatcctccattgttaaaattagcatagattttaacaatggaggtttatttatatgaataataatgaaaatataaattggagagaaatagttgctggcttttcttcttacgaaggaacgttaggaaatttctgcaattcaaatcacattactaaaagtcaattctattactataaaaagaagcttaataatgaaaataataatttacagtttcatgcaatttctatgaaagaaaaaagagtaagaactgagattactgtagttcaagctgatagacctaatataataatagaaataggagtagctaaagtacatgtaccggctaatgaaatagctattttaagtaatttacttaaggatctgattacaaatgttcaatcttaataaagttaatacagtttatcttgcatgtggtataacagatttgcgaaaaagcattgatggactagtagttatcgtgcaaacgcagctaaagctggatccgtttgaaaaagccttgtttgttttttgtaataggcaaatgaatagaattaaaatcctccactttgatgaaggattctggctatattattttcgacttgaaaatagtaaattgaaatggccgatgactccagacgaagctcttaagattaacaaagaagaattgaaatggctacttatgggatatgaagttagaactaagtctaaatttaagccaattgaagtaagaaacagcttttaaagcaaatattgctataagcccttaattttgaacttttacaagtttcggaattaagggctttgtggtaatatatgcctatatttgttgtgaggtataaaaatggatattttagatttagagaatcagctcgatgaaaaaacaaaattattgatttctaaaatggaagaacaaattcaatcaaaagataaagaaattgataatttaaaaaaggaattagcttttcttaaaggacaacttcttaataaaaacagaaaaatttttggacaatctagtgagcaagttgattcaagacagatatctctttttaatgatgctgaaaaagacagtgatctaaaaatagaggaacctaccattgaagaaattacatataaaagaaagaaatcatcttctcattcagggaaaaaagataacttatccggtctagatagagtcataattgagcataaaattaatgattccgaagcagtttgcgataaatgcggaaataatttagttgtaataggcaaaaaatcaaaagagattttaaagtataagccagcagaactttacatagaggaacatatttcgtatacatatgcatgcaaaaattgcgaagcggatgcagataaagtcaatataatttcagcaaaaataccaaatacattcttatataaaagtatggcttcaaatgaattattagctcatgttgtgagcatgaaatatcaatatgcaatgccgttatatagaatggaatcatattttaagatgatggatgttaatctttcaagacagacattatctaattggataataagttgtgcaactgagcttaagcctgtttttaactatatgaaagaggagctcttaaaaagaaattatatacatgccgatgaaacatatctgaaggttattgaagaaaacggaaaagattctaactcaaaaagattcatgtggttatatcgctccggaggcattgaaaatccagtaattctatatgattatcaaaaaacaagatctggatcttgtgcagaagaatttcttgaaggattctcaggctatcttcaaacagatggatatgatggctataataaggttaaaaatataaaaagattatattgcatggctcatattcgaagaaaattctttgaaataatatcatcattaagccctgaagctttaaagcaatcacatgcattagaagggtttaattattgtgagcaactttatgaaattgaaaaagagctaagggaacaatacatggggagtgatgattattatactgatagacatataataaggctcaagaaatctgcccctatccttaaaaaatttcaagaatatgtagatagtgaaattgttgatgctcttcctaaaagtcctttaggtaaagctcttgcatatgcgcaaaagttattgccatatatgagaactttcttaacgaacggatgtcttgaaattgataataatgcagccgaaagagctataaagccatttgtaattggcagaaaaaattggatgttttccaagacttcaaaaggcgcatcgtcaagcgcacttctttatagtattattgaaacggctaaagccaatggcttagcaactgaaaagtatttagtatatttatttgaagtgttagcaagttcggaaattaaagaaagggacatactagaaaaatgtatgccatggtcggaaaacattccagatcaactgcgtgtcaagactaccaaataattaatttacatataaaaatatacctaacagagaatttaaacttttctgttgggtatattttatcacttaaattgcgctatcgctacgcgtcgattctttgacgcttacataataagtataaaaaaattaaactttaacttatactatcgaagttatgtgaaataaaaatgaattacatacacttgtggaatgtttatttataaacttaagcaaatgtatgtaatttatttaaattccagcctttttatatttgaaatttattaatcttttattccaaatatttattttatatctgtataatatgcatatcccataagtcggctaatatttttagctacattcataaattcgtctttgtattttaataaatcatccatagtattaaagagtgttacagatgaaagactagttgcggcaataattttattagttctatcaaaaatgggaacagctatacatataacaccagtgtcgtattcaatattgtctaatgaatataagttctttcttataacatgaatttcttctagaagaacatttatatcagttattgtgttctctgcatattttatgaattctgtatcttttaataattctcttattttatcatcagaatattgagataatatcaatttgccagaagcagtacaataaataggcgctttttttcctatactagaagacattattatatttctactggtattttcggaagagaccttatctacataaattatgttagtaaatgactcgtcaggaatacaaagatgtatgacttcatcaaacttattagcaaagtcatatatatggggtctggcgacatttattaaatccatactatttgttatagaagaagataagttaagaagcttaattcctaattgatatttatcgttttctgtattttgtgtaacatattctttatattttaaagttgtaattattctatgtatggtactcttgcttaaacctaaattttttgataattcagcaattccacatccttttggatattcggctaagcaatcaagtatatcaagagcgcgttccaccgattgaactaagtttggattgcttaaatcctctgacatataaaatcctcctaaatagttttatctttatactacattgtaatgtttaattttaattttaacaaataaaaagttaaaaattttatttttataccagtatcattgacaattgtaagtgatggcattagaattaagataataaatgaaacggcgttccacagtgcggaacgatggcgtgcgttgaaaaaatttaataatacatataagaatgcaaatatttatatagaaaggggagaatagataatggaaaacattttggatcagttttcaatggacttttttagattagatggaaaagtggcaatagttactggaggaaatacaggccttggacaagggtatgcagttgcattagctaaagcaggagcagatttagttatttctacccacggtgataattgggatgatacacgagaattgatagaaaaacaaggcagaaaagtcgtatttgtgaaagcagatttaacacaaaaagaaggaaggcaggatgtgattaattctgcggtgaaatcttatgggaaagtagatatattagtaaacaacgctggaactataagaagaacacctcttcttgattataaagaagaagactggaacgcagttatggatattaatttgaatgctgtatatttcttaagtcaagaagttgctaaaataatggttaaacaaggctctggtaaaataatcaatatagcgtctatgttatcatttcaaggaggaaagtttgtacctccatatacagcaagtaaacatggagttgcaggtataacaaaggcatttgctaatgaattagcgagcaaaaatatacaaataaatgcgatagcacctggatatataaagacagcaaatactgagccaataagagcagataaagaaagaaatgcagaaatccagggaagaataccagcagatagatgggctgaaccatctgacttaatgggagcagtagtatttctagcaagtagggcatctgattatgttaatggccatattctagcagttgatggaggatggttagtaagataatcagtattcaaaattatatataaatattgactaaaattaaaaaatggccttatcaaaagtatagatatggaaatctatctctagattatttggtagggttaaaaacaaatatatagtgaaagtggtgtatttatggacgtaattactataggagatgcaatgattgcaatgtgtcctcaagaaaaaggaccaataatattttgtgacacattcaaaagaaaagtaggtggagcagaattaaatgttgcaatgggatgtgcaagattaggattgcaatctggatggataagtagattaggaaatgatgatttcggtaaatatatattaaagactgtaagaggtgaggggatagacacatcagaagtacaacttgttgatggatatccaacttcagtgtatttcagagaagttttatctgatggatcaagtagatcgttttattatagagaaaaatcaccaactagtacaatggatgcaaagaaattgaatgaggaatatataaaaaatgcgaaagtgcttcatattacaggcgtttttccttcaataactgaaaataatagagaagttatattagaagcagtaaaattagctaaaaaaaataatcttataatatcatttgatccaaacatcagattaaagatgtggactaaggaagaagcaaaaaactatatagaaaaacttttaccttatgttgatattcttttaataggtgatgaagaaatagagatattattgggagatacaaatatagaagaagcaataaaagttttccataataaaggaatagaaaaagtaatagttaaaaaaggagccaagggagcaataggttcagatggtaaaaatatttatgaaatagaagctattaaaccaaaagctttagttgatacagtaggtgcaggcgatggatttgcggcaggatttttaacggccttattgaaaggtaaatcactagaagattgtgttagatttgcaaatgcagttggatcattagttgtaggtgtcgaaggcgataatgagggactaccttactatgatgatgttttagtacatttagggcaagcaaagaaaatagaacgttaagaatagatatttgtatttaataaagtattttatgaatgatgtagattagttttaaataaaataaattaaagatgaggtgtaataaataatgtttgaaaaaatatataatacattaaaagaagaaaaggcagtagctgttattagaactaagacatatgaagaagcaaaagaaataagtatagcagcaattgaaggcggaatgaaaattatagaggtaactatgagtgtaccaaatgcaccaaagttaataaaagaattaaaagaggaatataaaaatgcttgtgttggtgctggaacagtgttaacaaaagatgctgtagatgcatgtattgaaaacaattctgattttattgtttctccttgtatagatgaagatgtaattgcttatgcaaatcaaagaaaagcattaataattccaggcttaatgacaatgtcagagttaaataaggcttacaaattaggtttgagatttattaaagtattcccaggtaatgttgtcggaaaggcatttataggggcagcaaaatcaatattcccagatcttagtgtgatgcctactggaggagtaaacaaagataatataagtgaatggatacaagcaggagcagattgtagcggcataggtagcgatttaaataaagtttataaaagtaacggtgttgcaggtgtaaaagaatattgcgcagatgttataagcaaagttaaaaatttataattttcagtaaagatttaaagcacttaattaataaaattaagtgctttaaatctttttttattaatgattttctgagctatttttttagatatttataaaatagttatgttagaaggcagattgttttacaaagcaacagataccattaatattatttaaaatgtatggttaaataatatcaatttgcaatttatatttagaaatttatctattgaataaaagactaatgatagtgactttatattaaaaaaatgatatattaataaaaaatggaccgagtataattaaaataatgagtagaaggaaggtattatacatgtatgaaatgaaggaagaatacaaaatcggaattgatcagattgatgagcaacacaaaaagctttttgaattggcagataaagcttatacgctgttaaaagatgaatttgcaattgataagtatgataagataatacatattatggacgaactaaaggattacacaatttttcacttcaagtcagaagaagaatatatgaaaagcataaattataaaagactatttactcaaaaagttgagcatgataagtttattaaaaatcttgaagaaatagattacaaaaacattgatgaaaatcaagatgaaagtttaataaaacttttgaattttttaaatgattggttaacagagcatatattgaaaactgataagctcataggagaatagtataattataataaaaacgttttattataattattttgcggtgagagtgagatatagaaatcttactctttttttattataaatttaaaaatgtaaatagtactcaaatagatgttgcaaagcattgattaaagttatataataaagaaaataaaatatatatcttcagggcagggcgtaaatccctaccggcggtatagcccgcgagcttttaagaaagcagattcggtgtaactccgaggccgacagtatagtctggatgaaagaaggtaacctattaggaattgaaagttgatctattattacttactgaatgtatgccctgatgtattttacatcagggctttttatttttttataagtattgcaaataattcaggagtaaataatgtaataaggatactttgatactaaattcctaataagctacaccaagaagataatcttttgggaggcaaagaatatgaatgaaaaaacaagtaaattaatcaagatctctttattatcagcgattgcaattatacttatgtattttgattttccaataatacctgcgtttccatggcttaagatagatctaagtgatgtaccagcattgttgggtgcttttggatttggtcctgtagcaggggtgataatagaattaataaaaaatcttttggttccattaattagaggaagtcaaacaggttttgttggagagacagcaaacttcttgtttggagcagcattaattttaccagcatcatttatttactatagaaataagaacaagaaaaatgcaatattaggaatgataataggcggaattgcaatggaggcaatgggaattgtgggtaacatatatttattattgccagcttatgggatgaagatgccagcggatatgttacagaattatgtttgggcattactagctttcaatggagtaaaggcggttatggtgtcagtattaacatatattctatacaaaaaagtatctgtttcaatttttaaggttgaaccaaactttggcagcccagaaaataagacaaaaattgtataattttaaaataatataatcagaaaaagctgtaacaaaataattcgaattttgttacagctttttattgtatattggttggtatataaatttagtattatatataaccatctatattaaattgatttttaacatgattattaaataagctaaagatgataacttatttagtgtaggatcaaattttaaagtaactattgaaataaagaggagtgctttctcctttcaaatttataatttagatttaatttggcatactggttataataatatataaataattaactttaaacagatatattatagtttttagatgcattaatatttattatccaaaaagtgataaaataaatttattaatggaaatctaaaattaattaataataattattgattaataatgaattatttggtattatatatatagaaaatattaaaagattaaagaagatatttaatgatcaagtgaatataaagaaaatgagatcataataatttatcatagcatcttgaatgcaacaagacgaatggctaaatgtatatcaaaaggaataacaagtaataataaagaggtagtagttaaattattaactctgcaagaagtcacaaaaatgatataattatagaaacctttaaattaaagatcattctaattagctaattacaataaatgcagaagcgcttaattgatatatattttacaagatgatagattaacatagtaagatatgtatttattaatatttaattatcaaatctaagggaggtttttttatggaaaaatatatttgtacagtatgtggttatatttatgatgaggcagccggtgatccagataatggagttgcacctggaacaaaatttgaagatattccagacgattgggtttgcccattatgtggagttccaaaatcagattttgaaaaagaacaataatagatattgttttaattgaaatttgactatataattattttagaaaatttataaataagaataaaatatttaaaaacaatagatataaggggctatcaaaataattttattagattttgaaagtcccttataatatatttagattaattatttaccacaaggtcctaaataataaaaatgggagaatgcatagatatgtttacagaagagagactaaacgaaatattaaatattctaaatacatatggaaaagttaaagttaaggatttaagtaaaaagtttaatgtaacagaagattgtattagaaaagatttaaaacaacttgagcatacgggaaagctaaaaaggacgtatggaggtgcgatccaaataagagaatcatctcagttgtatgacatttcagaaagagagaagatagatatttcaactaaaagcataattgctaagaaagccttagagctaatacaagatagggaaactatatttttagatttatcaacaattaatattcttatagctaaatctattttgacaactcaaaaaagaataactgtagtaacaaatatgttggagatagcaaatattttagcaaaagcagccaataatattacggttgtagttgcggccggggttttaaataaatctcttaatggttttattggatcttcaactaatgattttattaaaaaatataaatttgataaatcttttataggaagttgtggaattgatgcctttgacaaaagtataactacttttgaaattgaggatgggattactaaggctacaataatacaatctagtaaaaagacatttttagtcatggaaaacaagaagttttttgtagatggtaattataaatttgcaatgattgatgatataaattctataataacggatgaaaagcctaatcaacaaattatagatgtgttagaaagtaatgaaattgaattgatatagaatataagtgaatcaattagtagaggtgattttttgctacatataaattgatgataagtataaagagacaatttatgcaatttgaacataatgattgcatgaattgtctctttgatatgtttacctaagcacagaaatttgtaattgagatattactcctttaaccacattaaaatagcatcttccttgttatcttcatagtacccttttcgaattccctcttgtttaaagttatatttctcataaagggctttggcagcagcattactttttctaacttcgagagtatatgctatacatccttgagatttacaataagatagtaattcttctaggagtttagaggctattccttgttttcgatagtttggatgtattgctatgttggttatatgagcctcatccaatactatccatgttccagcaaatcctacaactttattatcaactttagcaacaaaatatttagcaacaggattggttagttcctgcatataagaacttttgctccagcatatagaaaagctcaacgagcttatatctaaaatttcatctatatcttcttctttcattaaatttatagctatattcactataatctcatcctttgctcgtattctctttcagcctgagattttttaagataaaccggagcggaatttggatcgtcatattctccgttctttaatagtatactgcctatttcacctaatgaagaggcacgaattaaattaaggtgattaggaggaaaatatgaatttggacaattatcaatcaaataatctttatatttatcaacaccatcgcctataaaaataactttttcatttttggatttaattatttctataagttcatcaatatccaatgctgaataatctaatagacgttccaattttataggtaaatttgaatcattattgttattgcagcaagtatattctcctttatatagtgaagtataaacactatttcttaaagcatccattatagggcatattataccatcgaaattagatacactaaatgcaagtgcatctaaactagaaacactaatgtaatgtttgttacttcccaagctaagaccttttattgttgccatgcctattctaagtccagtaaatgaaccgggcccctttgaaataacatagccatcaatatcatcaatacttaagttgttattgtttagtaactcttgaattatagacattagtattatagagtgttctttcttatcgtttaatgtaatttctccaagtagtttatcatctttcatcaaagcagcagttgccactttagaagatgaatctacggcaagaataatcatattttcaactcctttatataatcatatctttttccataagcatttagcgtgattttcctataatcttcgcctttgctataatctttctttatatctatatgaagtaaatcatttggtagaatttcttctatataatttgcccactctattattgatactgcatctgaaaatatataatcatcaaatccaattgcatatatttcatcaggatcacttactctataaacatcgaaatgattgagctttaatcgaccgctatcatattcgttaactatagtaaatgttggactagtaatattatcattaatgcctaatcctttagctatgccctttgtaatatgagtcttacctacacctaaatcgccagttaagcagattatatcaccggcatttaataatttgcctaaacttattcctaatttagcagtatcatctacattataaatttcaaattccatgaaatgcctcctttaagtgagaattaattcttattaattagaattttatatcaataacttacatatagttattatgtataaaacctaataattgttaaatctacaaactctcatccttttattttatctcaaaattgcataaaagcaaattattaatatattaactaatttaattatataaaacagggaataagcatccagaaaaatgtaataaatttgtatatatttattttaaattagttggtataataagaagaggtatatgctaaaatttaattaacagattaattgctgaggtaacatatataattcaatgtataaaagtgagtttattttatgtttaacctaataaatgttaattaataattaacttaagaaattaattacagtacatattaaaaataaagttataaatgaagtcagttaaattttggaggtgacttgtctttgaagaaaattacctttgccatggtgataataaccatagcattgtcttttggtatgagttttttttcaaatcctttattagctaatactgagaataatagaactgaaagcagagataaatatctaaatataatgacagttaataaaccacaatattatatggttaaaaaaattataaaggaaaagaataatgcagagtatatgtttactaatgagaaagatattagtgaatttaaatatagtgaagatgttttaaataatatatctaatatggatttatttatatattctggcacatcttttgaaccatggagtgattcgctaattagtgaattgaagaaaggaaaccttgggataataaatttagctagaggcataaaattattaaattatgggcatgataatgacactaaagaaaatccttactattttgaaggcatagaagagtataaaatagcattatacaatgtaaaggcagctattcaagatagagatcctcaaaatagagattattatgaggaaaattataatgaagctatcaaagattttgatactagcataaaggaatatagtgaaaaaataaaatccttaagtgaatataaatttattacattaaataatgattttgattatttaactaagtctttaaatttaaacactattcagcttgataatcatgagttaagtgaatttataaaaattaataatttagatcctaaaaaaataataataatagttgatggtgaaaaaggaacaaaattagatttgtcaggttataatactataaagctgtggaaatattatggagatatgtcttttgatgatttgatcttatacaatataaaagaattatcaaaatgggctaaaccaaatgaagtcgtaaattctagtaatgcaaaatagaattacttatttttggagatatatatcctgttgttattagatatgattatatactgcactaaagaatctgtaaattttgaatataaatataaagtactttctatttagtgtagttttattttcatgataattaattataaaaatatgttgctttctttatagatatgttatataatgattattgtcttaggggtatggctcaacggtagagtagtggtctccaaaaccattggttgtgggttcaaatcctactgcccctgccacaaaaatcgtagtacattgtactacgatttttttatataaaaaaattctaattacaacaaataattaggatcacaagggaatccttatttataaaacttaattttccacattagagatatgaatttaaatcaatagatataaatagtgatggtattaataaaaagtaaattaatataacttaattttgatttggagggattataaaatgttagaagtaacaaatacaaaaaaggcaccagcagcaattggaccatattctcaagcaataggatttggaaatatattatttacatcaggacaaataccgttagatccagcaactggtgaggttgtgggaagtaatatagaagagcaggcaactcaggtaatgaaaaatatatcagctatattagaagctaatgatattaattttgaaaatgtaattaagactacatgctttattgcaaatatgagtgattttgctagctttaatgaagtatatgctaagtattttattagtaatccagcacgttcatgcgttgccgtaaaggagcttcctaaaggagtattatgcgaggttgaagcaatagctttcaaaaatgtatagtttatagatgaaatgctaaaataatattattgtaaataaaatagactatctcaaagatatcctcgtaataaggaagttctttgaaatagtctattttttaagctttcttaatttcagatactaattcatccataagttctttcaccgttgtgatttttgttattctgcttgcattctcgccacagaatattagaccttcatcaaggttaccctttactgcatttattaaagctttgcttatgcaataaggtgtgttagcagggttacaaggtgttaaacaattataacaatgagttattttctctctctcagagctagttctttttacaaatgtattcttcatagctctacctggcattccaacgggactttttactatttgaatatcatctttgttacagttaacataggcatttttaaactcatccgaagcatcacattcttcagttgctacaaatctcgttgccatttgaacgccgctagcacctaattttaaatatttagcaatatcatatccatcaaaaacaccgccagcaactactactgggatttctttattatatttttcagcgtacttctttgtttcatttattatatctacaacagatttatcaaaatctaaattttcatcttctaactcttcaactttaaagcccaaatgaccaccagcttttggtccttcaattacaacaagatctggagctacattatcgtgcttatcccaaagtttcaaaattacttttgctgcttttaaagaagaaactattggtgcaatctttacagaggaattctttactattttaggtaacatagtaggaagtcctgcaccagagattattaaatcaactccagcttctattgcagtttttatatgatcttcataattattagttgctaccatagcattaatacctataatgccatttaccgctttagctttagcaatagtaatatgtttttttaaagcccttaaattcgcctctaaagggttcttttcaaagtcatcttcattataaccaagttgcgcagcagagatgattccaattccaccagcattagcaacagcagcagctaaattagaagatgaaacaccaattcccatacccccttgaataataggaataggagcaactaaatttccaattttaagagaattaaaattcattttacatatatcctttcacgaaaaattcgacaataaaatattttgactattaaagtattatattttattataaaataatatgagtagttaaacaagaagtatttaaaaaaactactatttagttaagtttgttttggtgtactaggctgctaagtttattataataatttactgatttgaatgattactaaaaattaaaataataaaattgttgacataaatgataaacacatgatacaatacttaatgtcttaggggtatggctcaacggtagagtagtggtctccaaaaccattggttgtgggttcaaatcctactgcccctgccacaaaggtcgtagtacgttgtactacggcttttttatgtacaaaaatgtatggtttataaaaaaatatattttagagttacagaaatgcatctgattggtttgtatatctgtgtaaataattatctaaaaataagtaaaaagagaataatttagtataaaatgtagaaaataacttgacctttcccagaaaaagtatataattttattaatataatgaactatatgtaaacataaataattatgtatttataaaaactattttgtgtcttgtgagtaagctattataaaatacattcaatatttgaatattgaagacatattatggtaataatccattgtgaggtggaatacgatatgaataaattagttttgctaaatgaagttagaaaaaaaggaatagagaataaaaatagattggcaaaatcaactaataatactattaatgaaaaagaaagcaataagtcctatatatcttttagagagaagtttaatttcttcaaagaagataatgaaactaataactcaaaaataagatataatgaggaattcaataagaatggtggtagaaagaacctaaataaaattgttgagagaatctttttgctaaataataaaacaataattgagcttgtaaattcattatataatgatgatttaaatattaatactagaatgaaatataataagactaaaaaaaatatagatataaatgaagatattaagttagaagattcaaattatgatttgaggatactagcagaagatgagtataggaagtttgaatacagggtacagtttcacgttaacgatgctgaaaatatagcaataataataaataaggtaaatttatcgaataatcacaatgtaataagccttaatgcaaaaaagaggaagagtgtaaataaaagtgaatatgctttgaaggagaactattctaaatccatgataatactgaactctaatattgaagttcctgatgtgtatccaattaaatcagaaactaaggaaaaaagtctagattataaaattaatataatcaaaggatggaaatatgattttaagcaattaagcgaaaaaaatatgtatttattatttccattaaaagcattagatattagaaaaagattattaaatatgaaagaagacttaatgtcaaaggatttaattaaagatgaaatgtatagattctttaaggatatgaataaatatttacaaagaggtaaggctgataatttaattacagataaagatattagtgaattgaatttaataacaattgatttactaaattcttttattaaagataagagtgatatatttgctgatataaaaagagatatagagacaacatttaaagagatagttgtatagaataaactcaattttgtagtgcaatagtaaaatgaataaatttatattgcgtagagatctcgattttaatatttaataagaggataaatattgaagaatgtccttatattaatgagaataataaataatcggaaggttaaaatactattaatcggtagataaaatttttagagttttgtttactgattctaccaattagccgaggaggggatcgttatgtcaaacaacaataataggacattagttccagaagcaagacgtggcttggaaaaattcaagaacgaagtagctcaagagctaggaataccatttaaagaatacaatggtaacttgagttctagacaatgtggttcagtaggcggagaaatggtaaaaagaatggtagaagaatatgaacatagaatctaatgaaattttataatttaatattgtttctatgtatgttaggatagtctaatcatattctaaaaaatgggagatgtattatacaaaggtatggtacatctcctgttttttatcctaatattatatagatgttttaattataaacgtgcataataatcgttttggactgttcgcaaatttcgtggtaaaattagaacaaaagttcgttatataaaaaagtttaggtgtgatattatgagaaaaattaaaattttacatatagcagatatacattttgatactccttttagtggaatgacaccaaagctagcactaaagagtaaggaagaattaaaacaagtttttgagaacataatgctaataactttaaatgaagaaatagatattttactaatagcaggagatgtatttgataatttatctgtaaagaaaactacacttcattttataaaaagctgttttgaaaatattagcaaggtaaaagtttttataagccctggaaatcatgatccttttaatgaaaagtctttttataacattgtagattggccaagtaatgttcatatttttaagggaagtgttgaaaaagtaatattagaggatttaaagactgttgtttggggagctgggtttaataccacacatgttagtaaatccttattaaaagatgttgagagaatcaacgaatataacaatataatggttatacatggagaagtttctagcgtaaaggaaggaaataattacaatccaattacggaagaagatataattaaaagcgatctagattatatagcattaggacatagacataagttttcagaagttaagaagataggtaatacatattacagttatagcggatgtcctcaaggaagaggttttgatgagcttgaagataaagggatagtattattagagattaagaatagatttgtagaaagtcggtttattagaacatcagtaagaaattactatgagaaaggaataaatattgaagggtgctttggatataatgaagtaaaaaatagaattatatcagaaatccctaaggatgatagaaagaataatttttataaaattattctaaaaggacaaatatctgatgaattttcattaaatgaagagtttctagaagaactacttaaagatgaattctattttgtgaagattattgacaaaagtgaaattaagttagatataaccgaattgataaaaggatactcattaaaaagcatatttgcaaaaaaaatatatgaggagctacagaatgtgaaaacggaggaagaaagggaaattatttctttggctttaaagataggaattcaaagcatctcaggtgaagaggtaagaattaatgagatgtaaattgataaaagagagagttagatattatagaactaatacattcgaaaatagtattggaagaaattgtattcaagtaaattttatgaaagaggtgaaagcttttgacagttaaaaaaataaatataaaagcttttgcagggattaaagataaaagcttagatttaagtagaggattcaatttaatttatggaaaaaacgaaaagggaaaaagctcaatcgagaattttatcaagatatggctgtatgggattgaaaattctagaagtaaactaaacgatagaaaaagatacatgcctctatctggagagaatatttctggagaattaataatagaacatgaaggaaaaagctatattataaaaagaagatttggtacaacaaaaaaagaagatgaatgcgaaattttagatgaaataacgggagagagtttgcaaatagaatataaaaatgagcctggaaggtatttcttcgatataaatttatctacttttataaagacattatttataggacaattaggagtagttatatcaaaagataaagaagaagagataatggagaagctaactaatgtctacaatgtgggagatgaaaatacttctgtaaaaaaagtaattgagaaattagaaaagaaaaagaagcaattgctaggaataagaaaaggtggagagattgatttattaaaagagaaaaataattcactaaaaacagagttatgggaagcatataaattagctgaagaaaacgtgcaaaatgaggaaaatttattaaggaagaaagatattaaaagtagtataaaagaacaaattcaaaagttagatttatataaaaagtatattaagaagataaaacttcaaaaagactacaaagaaataagtagttatttagttaagggagagcagcttaaaagaaaacaggatgcaataatcgaagaacttaaaaagggcgatgaatatataacaactgaatatttggaggaaattaatgaaaggtgtgctagatatctaagtttattagatgtaaaacaagaaaagttaaataaactttataaattggaagaagaattaagagtaaaaaacgaaaaaataataaattataaagttttttcttcgatgggaagtaatataaaagaaaaaatatacacattaaaagttgaccagaggaatttagaagaaaaactcaatgatatcataaatataaaaaattcaatagctggattcaagatggatataaacaagcaggcctctagtattagcaacttagattttataaaaaataatagagaagaaatagagaaattacttaattcttataaagaaggattaaaggaattaaaatataaaatggagaatcaggattatagtaagtctgaaggagacttaaatagcttaaataaaaaaataaattgtatttattttattggagcaatttgtatttctacttttatatacagtatgttgaagcaaataattcccattatgattatgtttatacctatatttattataataggaatagtatatttcaaatattcgctattaattaaaagttcagatattgttaggaaaaataatatatcaattgatgagctaaaagaaagaatagaagaatatgaaaaaagattagatgtttatataaagaaaactaattcagtatcttatgaagattttattagtaagataaatcaatatgataagtatataggttataaagataatatgattttattaataaaaaataaggaagaggagattaacagatatgatattactaaattaaaatcaaattataatagaaataaaggtgtgatagcatctttgtataatgttttaggatgcaagtctttagatgaggtgctagaacaattggaattctatgaaaaacaaaaagaagaaatacttataaaggaatacgagattaatacaattaatcaggagatagaaaatacaaatgaacaattagccgataaagatgatgagataagaaaaaaaactcatgtacttggattagaaaatatagaaatagtagatatgcatgttaagttgagagagtataaagaaaaaataaataaaatgaatgaaattaaaaatgcattgaaaagtgtagaggaaacatataaggttctaataaaagatagaaatatagatgaaataaaggaagagatgaaacaaattattagtcaggacataaactattcctatgaatctgaagaagaaatagactcagagattagagcgaagtctaatgaattgttgaaaatcgagaaggagataaaggatttagaacaccttatagaaaaaaggtatttaggtaaaagggaaatttcagagatagaagaagaaatattaattaatgaagaaaaaactaaaaagttggagaaagaatttaaagcattagagttagctagtaatttgattcaagaagcatttgatgagataaaaaagaatattggaccagatatgaataagaaaattataaagaaatttaatttcttaacaaatgatgattatgaagaagctaagatatcagaagactataagctaaagattagaaataaaggaatactattcgaaggggaaatactaagcaatggtgctaaagatcaactttatctagcattaaggttatcatttataaatatgttgtttaaaaataaaagaatcccaatatttttagatgatgctcttgtccaatatgatgatgagagaagagagcgggcattaaatcttcttatggatgaaaattttgagcaagtaattttctttacatgtcaaaaaatagaaaagcttattcttgatagaaataagtatgattataatttaattaatctgaattgataatactatcctaaattaatatttaactaatcttgacatatttaaactttaacagtaatattataaacagagttgcaaatgcaaatcagatgcaaactggaggtataatatgaagaagaaaataatttcgggagcgttagcggtattagtaagttttatgctaataggatgtggagctaatgcaaatactggaatacaaaacaaaactgaagataaattaaaaattgcagtttcaatatatccattaaaagaattcgcagagaagatagctggtgataaagctgatgttatatgtctagttcctgataatatggagccacatgattatgagcctaaaaccaaagattttcaggaattaacaaagagtaatgcgtttatttataatggcttaggcatggaagaatgggtaggtcaagtaaatgaagctattaagaatactaatgtaattgttgtagattcaagtactggtatagaaaccaggcaagagggggatgcggttgatccacatgcttggctaagtttaaaaaatgctgaaatccaatcaagcaatataaaagatacactagtaaagttagatgagaaaaataaggattattatgaagaaaactacaataaatttaaagaggaattagagagtttatatagtgaatataaacctaaatttgatacattaagtaagaaaaatttcataacaggtcacgctgcatttggatatttatgcagagacttcggattaactcaaaaatcagtagaaaatttatttgcagagggtgagccaactcctaagcaattaaaagacttagtaagtttttgtaaagataacaatataaagactgttttttcagagtcgttagcgagccctaaagtttcggaaactttagcaaaagaagttcaagctgatgtagttccaatacttacattagaatcaaaagaagatgacaaaaattatatagaagctatgagatacaatttggatgagatatacaagtgcttatctaaagaataaactagattaattttaataaagattaaggattattttcaaggttatattggaaataatccttttaattttaatccttggagttaataaaatcacatattaggtagatttctctgacttaaataaaaaaattatcttagtgttttaacaatatatataagtttaatgaaaaaataatttaaacaaaggaatataaatcgaatttattatggtaatattatacttatagaatatgtattttatagatgaactcactacatacagctaaaatagatataaggtaataataaaatagattacacaagataaaaggtagattaaaatatcctgaattaaaaataagatatcttaatgtactttattttatttatgatatagaattggaacattagtttaatttatattaattatttgagctttgtttaattttaaattacgaagtttagtttatagtcaataagaagattgcttataaaaataaaattattatgttaggaggaattatgagtttagcagaagaattttataaagagaacatgcaacgatgtttaagacaaacaaaagacctgaactataaggtaaatattattggatggagcaggttgtttgtagtatttttaggtttattaactgattacattttatatagtcagaataaattaagtctaatattaatctcaactatattttttattggtatctttattgttttgatattttatcacaataatataattcaatacagagaaaagatcaatatgataatgaaaattaatgagaagggaataaaaagattaagtggagattttacgagtttcgaggattctggttcagagtatttagattataagcatccatttgtagatgatttggatgtatttggcaataactcgatttttcaatatattaatgatacagtaactaaaggaggaagagaagaactagtaaagttattaaaaaatgaaggaaatttgaataagcttgatattgctgaaagacaagaagctgtaaaggaactgagcaaaaaagctgcatggaggcaaagtttaattcttgaaggtagtttgaaaaaatcaaaagatatagacttagatagtttaattaattggagtgaagatgcagaatcatcaagtccactgagaattgttattgcatgtacttttattttagtaacaattttttcgatatatttagcaatagcaaaggtaataccacaatcatttctacttttaaattttatggtgaactttatcgttgttaaagtgttatctaaaagcatgggttcagagattaagttatttgaatccataaagaatagcatatatgggtatagtaaaattttatttctaatagaagaagaaaattttgattcaaagtatttaaagaacttacaaggaaagttgaaaagtgataaattaagttgtaaggaagagatgagagctttttctaatatcttagattggatgggaaatagttcatataatgcatattatctcttatttaatatactattattttctgatgtattcctattaagaagtttagaaaagtggagagaaaagaatgggaataagcttaaaggctggttagaagtaatgcataaaatagatgcattagctagtgtatgtaatttgtcatttgaaaatgaaaattggacgtatcctgttattttagataaaaatgaaataagtgcagtgaatataggtcatcctttattaggagaaaaagcagttaaaaatacattttcaatgacgggtaatcaaaaggtttctctaatcacaggttccaatatgtctgggaaaagtacatttttaagaacacttggtactaatctggttttaagttacatcggagcaccagtgcatgcagataaattttcttgtggaattatgaagatatacacttgcatgagaacaaaagataatttagaagagaatatttcatcattttacgcagaaattttaagaataaaaatattaatagaggcatgtaaaagaggagaaagtgcattttttctactagatgaaatatttaagggaactaattcaagagataggcatactggtgcctctgtattgattaaacagttaattaaatacggaggggttgggcttgtttctactcatgactttgaattatgtgatttagaaaatgaaagtgaagagataataaattataattttagagaattttatgaaaataataaaatcaaatttgactatattcttagagaaggaagaagtacaacacaaaatgcaattcatttaatgaagcttgcaggaatagaagtataaataattaagtttaaagaattaaaattagcattagaaaggattaagcatggggtacattattattgacttagaatttaataatttaaaaaatataactaattatcaaaaagatttttttgaaaaatatggcgagtttgattcagtaagtctggaaaatgaaattatagaaataggtgcagtaaaagtagataaatatatgaaacctataaaagaaattagggagtatattaagcctaaaatatttcctgtaattaatccaatagtaacagaaatcactaaaatagatatggatatacttaatgaaaaaggagtgtcttttgaagatgctataagtaaattaaaggatatgtttgaagatggagatgttttatgctcatgggcaaaggatgatgttgcagaattaattattaacgcccattattataattataatgatttaagatggttaaatgaatatctcgatattcaagaatatgttactaaaattttagctcataaaaaagcattggggcttaagtcagctttagatgaattaaaaattaaagtagatgatacaaaattacatgatgctttaaatgatgcaaaatataccgtcgaagtatttaggagagtatataattctagagtgataaaaaattatatagttaaagatatatataatatgcctgctatacaggtatcagatcttgagagtatagaaatagaagaagaaaaattaatgctaaagtgtcctaagtgtggaaaaaaaattgatttacaaactcctataaagcttttaaattggagatttgcagctgtaggcacttgtccgaaatgtaagtgcaatgttttatgcgaagttttggttaaaaagactcttcaaggagagaatggatataacgaagttaatagtgtattgaaagatgaagcgtacttaaattatatctataagttagagaatagtgagaaaaaaaggtgatttcagtatatattcagaaataagtaagaatttagttaaagaaatttaatccgagatatgataaaatagttttgtgaagaagaacaaaacgaatacattgaatgaaaggattttatttatgaatatagccttttttcttacaccaaaaaatgaagttgtatgtgaaaatcaagatgcaactatgaaacaagttatggagaaaatggaatgctacggatacacagcgattcctattatagatagagaaggaaaatatgttggtacgctaacagaaggcgacctattgtggaagttgaaaaatacacataatctaaattttaaaaacatagaatctgttaaagttaaagacatttatagaaaaacaactcataggtctgtttctataacttcaaatatagaaagcttaatatctttagctgtaagtcagaattttgtgcctgtaaccgatgataatggtacttttatagggataataaaaagaagtgatataatcaattattgtttcaatgagatggaaaagagaaaagaattagaaatacaacaattttcaatgtatgatgaaggttaaagtattataaatataagatcgcatttattttgaaaatttaaatgtatgagcgactcaactggtaaaaaaggagatacgcatcttttatagtaaagatccgtatctccttttatttgtataaagaataccaccggttagaccggtggttctgactctgagaaagatttgcttttatgaataaatttcgggctataacttttatattattagataataggtttttaataatctattctgcattttgataagtttctactacaaaatcaaactcgttgggatcagttatctctccgtaactatcttcttttattccagggtaatagtatagtactagcttatcattagagttgttgaaattttctagaagaatatataaattatctaaagtacagtcttcaacgacagctaaaacattatattttgaagaaactcgagtatcgttgttagtaagatctagcgtaaaattatcaaactttcttacattgactctttctttatcacaagagcaaattaaagaaccgcttctacagcttgaacattttttgaaattgcaatcaaatgcacagtttaagcattcacaatgagaacatttttctaactgtttaaagttttctctatttttagttttgaaatcttgaagtaagcttatgctaggactagatttgaacattgaaaataaagattttttcttacagtcagtttctgcagaatccaaaagcttcatatattccttaagaataggtgatttagagaaatattttcttatttttgaatctctttctgaaataaatggggatatttcacttatggcataagctatatcagtataaatctttccccaataccttcgttcttcgttaataaaatttaggtccttatcactatccatattttatcacctaattagatttgtattttgctaattcaagatctaaatcaacttcatctaatttcttaaattcactatcaaaatcatctaggtctcttagttcacctaaaccttgagcaagagcttctttacgttgaatttttctttctatactatcaatttgtattgagttacttttagtttgaacattagctagaacctcatttactttttgagaggcttcagcatttgcaaatcttgcagctgcctcatctctgtaacttctagtctttgttatttcttcttccaaagcacgtaaatttgcctttaaagtatctgcttgtattttagcattatcatagcttgcttgtagagaagcagcctttttatctgtttcaacttttttagctaatgctctttttgctaattcctcatttcccttgcttagtgctaatctaaccttttgatcataatcttcagattcttttttagcagaatctagttttttctcaatttcatgaacattacctaaaatttgagctgaactcaattttgctttattgaattgttcatccatatctcttagtttttgatctaataattcaactggattttccatttcatctaatgagttgtttacttttgccttgatcatatttgacatccttgaaaaaattcccatgcctatacctccaaataattattattttcttttattatttaaatatttttttattaatataatagctagtacgaatactccagctaaaactaaggtgttaattaatgagcttgttggtgaaccaaaataaaatggtctgtaaaagtatcctccaccaaagaacggccagaatgaatgtctgttggaaccactattatatgtttgagtattagtatttttattatcatttgtattagaagaagttgaggggtcagtggttctacttttatcagttgtagaataagaaccgctactaaatccttgtgatccaccactacttgaagatgaagaagaattctttgaatttgagtttgaagaatcactattcgaaaaattaccagatttaaatccttcaccgctctttgaactacttgaatcaccacttgtgcttgttgaggatttactagatgaacttgatccactaaaagatcctgaactaaatccactacttgattttgaactgctagaactaaatttgctgccgctagagcttgatcgactgctactaccagttgatttagcaaaggcgactgtagtattgttagatgtatttatacctataaatgacatagcatctaaagataaattagaaaatataaatatgaatgttaaaaatatagttaaagcatatttttttttaatcttacgaatagtgatcaccccttaaaagattatgtacttattatataaaaaagattccttatacacaatatggaaaagcaatgaaaaaagactaaaaaggatgattataattgtatatcgcaacaaaggttattatatctcttttataatggttatttcttatccttttaaatggtattatatactacatatcaaaattgtaaataattttgataataattagattaaaacaatgtgtatttttatattaagataatatgaggattaaattttaaaatgattgtatatatgttgcaagtaacaattaaggctaaatttcttgcaatatttttagaattatcatgaagaattattttggtaacatatatattataattatatttgtagcacagcaaaccgtacttgtgtaaaagattctattagactattattgtaagtaagaaaaattataatgaggagtgaattatactatgtccaatgaagaattagaaagcaatatgagtgaacttttaaatcaatacgatgtaaaaagactaaatagaggagatgtattaaaaggtaaggttatagatgtaaacgataaggaggtttcggttaatatagattatgctttcgatggattaatagctaaagaagaagtatctataaatggcagggatccaagggaagtagtcagcaaagatgatgaaatttatgtttatgtaatatctccaaatgatggtgaggggtatgttgaactttctttaataaaagccttagaaataaaggaaagagaagaattaagtgaatgtttcaaagaaaaaaagaatgttaaagtacatgtgaaagaagaaaccaaaggtggagtaattgcatactatggcaacgtaagagtgtttattccaggctctcttgcaagcagagaaagaattcaacttaataatttaataggaagagatttagatgttagaatcactgaattagactttaagaacaaaaaagttatagcatcaagaagaattattgaagaagaagaatataataaaaataagaaaaatatatgggataatttaaaagagggagagaaaagaaacggagttgtcaagaaaatagttaagtttggagcttttgttgatattgggggagtagaaggattaattcacctttcggacttatcatgggaaagagtaaataagccggaagatatagttaaagagggagataaggtagaagtatttataggtaatatagatagaaaaaatgaaagactatcattaatattaaaagatgtaactaaagagccatggacagttcatggtaaagatattaatgaaggcgatatatttgaaggaaaggttgtgcgtcttactacatttggtgcatttgttgagttatttgatggtatagaaggtttagttcatataacagagattacagacgaacatattgcaaagccttcagatgtattggaagccaatcaaaaagtaaaggttaaggttctaagtatcaatatggaagaaaaaagaatagcattgagcataaaagaagctgtagaaactaataaagaatatcttgattacattgacaacagtaatgaaagtggaacatcattaggagatttacttaaaggatttaaatttgagtagatttacagaagtttaaatatgaaaaataagtatggataattatccatacttattttatttttgggtattctgcttaaattttttctatttttaacatattagttccgccagtttgagttgttggcattccagcagcaactattatatcgtctccaggttgtgtgaaatttagactaaatactgtgtttttagcttctgttaatatttcatctgttgagttaaacattttacaaggcattgggaagattccaaagtttaagcttaatccttttcttacttgttcataaggtgttatagctatgattggagcctttgatctgtatcttgaaagtagtcttgcagtagcaccgctcttagttgctgccactatagcttttgcatgtaatatgttagctgttctacatgctgaataacttattgcagctgcgtagtcagtaagtgatggttctctaagtcttgcagttaagtggttataatctaagtattcttcagcttcttgagcaatttttgacattgtctttgctgcttctatagggaaacaaccagaagcactttctccacttaacatgattgcatcagttccatcaaaaatagcgttacaaatatcacttgcttcagctctagttggaagtgaatttctaatcattgaatcaagcatttgagttgcagttataacaactttaccagcttcattacattttctgattatcattttttgtattataggcactttttgaattggaatttcaacacccatatctcctctggcaaccattacagcgtcagttacttcgatgatagaatctatattatctacaccttcttggttttcaattttagctattacctttatatgttccccatggttttcttttagaactttctttacatctaagatatcactggcttttcttatgaaagatgcagcaataaaatcaacgcccattttgcatccgaattttatatcttctatatctttttctgtaattgatggtaatttaataactacattaggtacatttacacccttatgatttttaatttcaccacctacaacaacttttgtatgaattgttttaccttcaacaccagtaactttaaattttagaagaccatcatcaacaagaatttttccgccaacttttatatcttgataaagcacatcatatgagattgagcatcttttctcatcaccaagaatttcttcgccacatatgaaatcgaaatcgtcaccgtcattaagagttacaccatcgtttacaaagttatgagttctgatttttggacctttaatatcaagaactatagctgttgcagaattcatttctttacttagacgttggattagttcgattttttctttgtgtgtttcatgtgtaccatgagaaaagtttaatcttgcagcgctcatcccaatttcaatgaactttcttaaagtctcctcattatcgcttgctggaccaatagtaaaaatcatttttgttttttgcatataaacacctcacattaaaattttgtatatatattatagtgtgtgaaataattaatcataaaataataaaaatatacataatatagcaatattttatgataaactaagaaaagatatgtataatcatattctatcatataattgatgaaaggaagagagtagaatgaaaaatttagagaatattacggggaaaagaattttttatcattttaatgaaataagtaagataccaagaggttctggaaatgagaaacaaataagtgattatttattgagctttggaaagagtttaggattagaatgtattcaagatgatgccctaaatgttattattaaaaaacctgcatcaaaagggtatgagaaagctccaacagttataatacaaggtcatatggatatggtgtgtgagaaaaataacgataaaattcatgattttgaaaaagatccaataagtttagtggtcaaagatgattatatatatgcagataatacaactcttggaggagatgatggaattgctgttgcttatgcgatggcaatattggaggacacatcgatagaacatcctgctatagaggtattaataacaacagatgaagaaacaggaatgactggagctaaagctgtacgatcaaaagatttagatggaaaaattgttttgaatttagattcagaagaagagggaaaactttgggtcagctgtgctggtggaattagaactgaatctactttgcctattgaatggacaaataaaaaagaaaatacaaaagaatatgtgattgaagttaaaggattagctggaggacattcaggagctgaaattcatttagaaagaggaaatgcaaataaattaatggcaagagtattaagggaaatcttaaataaggtatcttttaatttagtttcattaaaaggtggagcaaaagataatgcaataccaagagaagctatggcggttatttcaattgatcaatcaaaggaaaaagaactgattgaagctaaaacaaagatagatagtgatatttctaaagaattgagcacaaaagatccaggacttaagataacattatctgaaagtaaagataaaatagaaaaagtattttcagatgatactacaactaaagcaattagtttatcatatttgtatccaaatggtgtaaacacaatgagttctgaaatagaaggattagtggaaagttcatcaaatcttggagtggtaacaaccaatgaaagtgatataaaatatcatagtgctgttagaagttctgtgttttcattgaaagaagaaatagttgaaagaaataaatgtttaactgaaattatgggtggtacatttgagtctgccgcaggatatccagaatggccatataaaagtgattcaaaaataagggatatatgcaaagatgtataccttagaatgtatggaaaagaagcagaagttgtagctatccacgctggattagaatgtgggatacttaaggaaagacttggagatttagatatgattagttttggtcctaatatcattgatatacacactccaaatgaacatttaagtatatcttctgcttgtagatgctttgaatatttagtagaagttcttaaggaaattagaaattagtataaaaaattaattagaacagtaagttaaccagaaaatttattggataacttactgttttttttattattctcaggattttgagttttaagtttatttataaaaaagataatgagtaagaaataacaaaatgtaaaacaaaagtcagaaaattataaatttacagtaaatgaccattattgatagcaatattgaggaaattagagatatttcggtataaataagaatataaaagtataaaaggtttgacctttacctagcttatcactatactagatacatgttttaaaatttacagtaaagtgtaaacgataactaaggtgccttttaaggtaatatagattaggtatggagaggaatttaagatgaaaattaaaaataataggcttatgaaatgtgtaattacaacttttattttttcgggagtttttcttattaatatgcaacatgccaaagctgatactacattaacacataatagaggaattacaattaagactagtgaacttaaaacagctaaagtgataaaagcaccatcagattcagaaacagtatcaaatggtgaagattcagtatcaagaggagcaattagtaagggaaatgaagtcgtaaattatgcatataagtttttaggaaagccatatgtttatggagcggttggtccaaatgcttttgattgctcaggattaacacaatatgtttataataaatttggtgtagatatatcaagaactacatatacacaagtaaatgtagggactaaagtggataaaagtaatttaagagctggagatttagttttttttaatacagaaggatcaattagccatgtgggaatttatattggaaacggagaatttatacatgcgccaaggtctggaaaaccagtaatggtaagttcattgtgtgatggatactattcagaaagatatgctactgcaagaagaattttttgctaatggatatagttaacttaagatgctaaatgtaaatataatatagttggaaatgatatagaagtatgcctaggagtgtaggaatatgactttctatagccttaatattgcaaatatataagtttagatttttaaaatatgccctatataatatttttttatttaacataattcatatatgtgtaacttgcagaataaatattaatatataagaaatctgaaaaaatagcaggtcaaatatatataatattattctgttttataatgttttctataagttttgataacatataaaacttaactttttgacacgctatttttagaatgttcaaaaggggggagactatgagatacacaagatatgaatataaaaaatcaggcaggatgaaattcttatgtagtgttgtcgttatcgttgggatatctatagttggaggcgtgcttattagtaatgttatctttgatgggaagagtgtacaaaacgtaggcataaatagttcaaaatcttcaactcaaggtgactataacggtacaataaaaaatatcatcgcactgcaatgtggttattattcaaaagaggagaatgcaaaagagtcgctatctgcaatatcaaaatactgtcagccatttatagtagaagatgatggtaaatatagagttttagcaggaatatacaatgaggaagatggcttaaaaaagatagaagaattcaagtccaataatattgatgtcgctaaaattagtttaggtgcttctagtgatgacttggaaaataaaaagctcatagaaattatgaatggatttttgacaattgtgaataagttacaagataatcaggtgaaaagtataaaaacagcagaatttaaagcctggacggatggaattgtaaatgaaggaagcacagccaaatcaaataagataagccaattatatgattatgtaaaaaatctgcctgatgaaatggataaaacgaacagtagcaatgatatgcaggagttatataaacttattaaaaactgaaagatttagttaataattattacaacaaaattacatttatataaaaaaacttataacttaatataacacacttgtttaagaacatcttaaatgataaactataaggtgtagaaatggtagaatatcatttctacacctttaaaatttaatagtttttggttaaaaaattaacatgtctacaatatatattatttgtcaatgatatataataaggtacattcaaagaatgggagatcattatgctcgcctattatttttcatgtgccaaaattctttattttaggatgtgaatatatgaaagtaatattagcttctgcttcagaaagacgacaagaactcttaagtagattaattaagaattttgatgttattgtcagtaattttgatgagagtaaagttatttttgagggctctatagatagatatgttaaagacatagctttaggaaaggcactgaatgttaagaataagctagatgaggatgcgattataatttcagctgatactgtagtcaccatagacaatatgatactaggaaaaccaagagatgaagaagatgcttttaatattataaaatcacttcaaggtagaaaacatttggtttattctggtgttgttgtgattaatacagctaaaaatttgacgattcaagagagtttatctactgaagttactttttctgaaataagcgacgatgaaatattagaatacataaaaactggtgagcctttagataaagctggtgcttatggaatccaggggataggtggaatatttgttgaagagataagaggatgttattacaacgttgttggactgccactgaataagctaaagtttatgcttaaagagatacaataattatattttagggatagaggggaaatcatatatttggaggtaatatattatatggaaagtagccttaaaatcaaagatataccacaaaatgaacggcctaaagagaaattattaacttatggagcagaatctttaagtaattcggaattattagcaataataattaggactggaacacaaggagagaatgttcttcaattgtgtagcaggcttttatctgagctagaagggctaaatggtattttagatgcaagttttgatgatatagtatctataaaaggtattaaacaaggaaaagcttcacaaattttagctttagctgagctttttaagagatttagaacattgaaagcaataaataatgacatcaaaataacttcaccaaaagacttatcaagtcttctcatgggagaaatgaacgaattaaatcaagaagtattaaaagttgtcttattaaataccaagaatatagttgttggtattaaagatgtttttaagggtagtttaaatacgtcggttgtgcatccgagagaaatttttaagcaagctataagtaagaatagcgcatcgataattatatgtcataatcatccgtcaggcgatccgacgcctagcagagaagacataaatataacactaagaattaaagaatgtggaaatattataggaattcaattagtagaccatattataataggaaataataaatttgttagcctcaaagaaagaggactaatatagaattggaaggggaaaaataaatgggattttttggatcaggaaaagatatggggatagatttgggaactgcaaacaccctagtatttgtaaaaggtaaaggaatagttttaagagaaccatctgttgttgcaatgaacactatgactaaaaagacattagcggttggatcagaagctaagcttatgattggtagaaccccaggaaatatagtagctataagaccattaaaagatggagtaattgcagattttgatacagctcaaacaatgatgaaaagtctaatagaaaaagtatcaactaagaatgcatttaaaaatccaagaataatagtttgttatccatcaggagttacagaagttgagaaaagagctatcgaagaagctacaaaactttcaggagctagagatgttattttaatggaagaaccaatggcagcagcaatcggagcagggcttccagtaagcgaaccaacaggaagtatgatagttgatattggcggtggaacaacagaagttgctattatttcattaggtggtatagtaactagtaagtcacttagaatagctggtgacgagttagatcaatcaataatatcttatattaaaaaagaatttaacttaatggttggagaaagaacagctgaacaagttaaaatggaaataggttcagcttataggacttcagatgaagaaacagtcatggagattaaaggaagagatatgattactgggcttccaaagattgttgaaatttcagaaactcaagttagagaagctttaaaagaaccagtatatgctattatagaatcaattaagacaacattggaaaagactccaccagaactttcagcagatattatggaaaaaggtataatgttagcaggtggcggggcatatctaaaaggattagatatacttataaataaagaaacaaacatgcctgtacatattgcggaggcacctcttgattgcgtagtacttggagcagggaaggcactagaagattttgataaaattagcagagatcaaagaggttaaatatgaagcttcttaagaataaactggcagtaactattatagtactgtcagttagctttttagggttaatagtttatacagttagaaaggaaaatagaagtattattgaaagtggtgccggtagtactttaaatccagtgcaaagtctcttatattcaggaactagtaggattaaagagaccttagattttttcttgaatttttcagaagtaaaagcgcaaaataaagaattaattaaagaaaatcaagaacttgaaaatgagttggctagttattcagatttaaaagaagaaaatgatagattaagacaagtgttgaattttcaggaagaaagaaacaattataactatgtagcatgtgatattataggatatagtggtggaaactttttagatggttatgtggtaaataaaggaaaaaatgacaatatacaaaagggtatgattgttatagcggctcaaggtctagtgggacaagtaaccagtgttggaagtaattggtgcatagttcaatctctgattaatgaaaatatagcagtaagtgttatggatcaaagtactagagatgctacaggttatataaaaggtttcaaagatagtacgggagaaaacttagctaaggtatatgatcttccaatgaattcagatgttaaggaaggcgatgtaataatgacatctggagtaggaatgctttatccaaaggaaattagaattggtgaagtaatttcagtagaagaagataaagtaaaagtaatgaagaatgcagttgtaaaaccatatgtagattttaataagttagaagaattatttattgtctctccaaaggatacgagagaaattaaatataattagaggtttataatggaaaaattaattattattttgatttctataggattggttatattagataactcactaattccttttttttcaataaagggagcttatcccagtttaatatttacttttgctatagcttattcattagtcaataagaaagaacgagctgtatttatgggtgttgtgagtgggatacttcaagatattttcttttttaatggttttggtgtaaattcattattgaatttatttctatgtcttctagcaagttttattggagcaggaataataaagactaagagactgatacctgtgatctcggctttttttataacaataattaaatacgcaggagttatgttgatatttaatttttttaatattgaaatacaattttctaaaagtatcattatgggggtatacaacggagtaataatgttttttgtgtataaattagtaatgaatgtttatgatgatgagtattcaaagcaaagatggaggtttagatgatagtaaataaaccaactaataaaaagaaaaagaagatttctagatatacagttttatctataattatgatagctatattttcagtgatcattctaaaattgttatatattcaagtatttaattatgatgaatataaggataaagcagatgtaacatcaacaagatttatatcagaaaaagccccaaggggtaaaatatatgatgacaaaggaaatgttttagcaactaatattcaaacatacactattacatatacggaaacaaaagatgctgataaacagttttatataactatgaaagaactttttaaaatattggatgaaaatggagaaggcattcaggattcgttacctttaaaaattgatggtaataataatatatattttgagtataaaactaatgagaaacaatcccaaaatatagaggaattgagatttaaaaaggataggggactgaatgacactctaaaaaacaaaatgttcaaggatgttgaagaattatcggatgaacaaaatgcaaaactagatgaagaacttctgaaaataactcctgatgatgcattttatgcattagttaaatcgtataatttaattggccttgtagatccagattatgactcaaaagaaaagaagaatgtctattctaaaatggaaggcaaggatttaacagatatgattttaaaagaagggtattctttaaatgatattagaaaatttatgcttgtaaaagatgctataaaaatgcaaagttttaaaggatataaatcagtaactattgcagagaatattaagaaagatacttcattaatagtaatgcaaaagaaatacgatttgccaggaataaatgtgagttcggcacctataagatcatacccatataataatttagcatcttcagttttagggtatgtatcttcaattaatgatacacaaaaatcaacatatgaacttaaaggatatgatgtttcatcagattctgtaggaaagtctggaatagaatcggctttcgaagaacaattaaaaggagttaagggtggaacaactgttaaagttaactctaaaggaagtgtttcgcaagaattatttaaacttgaaccttatccgggagatgatgttcatcttacaatagatagagatattcaatatgcagcagagcaagcattggcagataaaattgctgatatgcaggctaccggaagagatgataaaggaaatagactattgaatgcaaccagaggtgcattggtagcagttgaagttaaaactggaagggtattagctttaacaagttatcctaatttgaatccaaatttatttacagttccaggacagttaactcctgagcagtataaagattattttaatcctgatctagaaaagtttggacaggagtttattaaaagaatgggacttaataaaactgttgatgatttgttcccagtaagaaatggagttagatgggataaatttgatttatacccaaaagcaacatttaattatgcaactcagtcattaattccaccgggttctacattcaagcctcttacagctgttgcaggtttagaatcaggggtaataactccaggtgaaatgataaatgatacaggagtatttaatattcatccagagatttttggtaaagcttttaagccaggaggattagaagctgcacaagggaacataagtttaacaacagctatagcaaaatctattaacttctacttctatgaaactgctactagaatgtatatacaagcaggaggtaaggctaataatgttgaagctctaaattctcttgctaaatatgcttggcaatttggattaggagttgatccaaatagtaatgcaaagaagtcaacaggaatagaaattggagaaagctttggtcagacgtacaattttactgataataaaaagaatttcttagcaatgtcgacagataacataattacatttttagataacggtgaatacaacggagtgttttttgctccaattcatttaaaagattctgataatgataatgatgcagttaaggcagctaagaaagcaatcaaagataaagtcaaagatgctatagataagaattctgataatcagcaagcagtaagccatgatttttttgccaaggatataaaaaaagatgttttaaacctaatgaataattctgatgagtataaggcaagtatatctggaagaagcgtaaatattgattcccaggctacaatagtagcagaagaattagctcaatttgcaactaatgatatgccaggacaagtaagatccccaggttcacttgtttcagcatcaataggtcaaggaatgaataactttactccattgcaactagtatcatacatatcaactattgcaaatggaggaacaagatataagattcatttggtagataaagttacagatggggatggaaatatagttcaagagtttaaaccagaagttttaaatacagttaaaatgtcaaaagagactcaagatgctgttaagcaaggaatgacagctgttaaccaagaagcagatggtaccggtagttctacatttttaggatatccaataccaacagctggtaagactggtacagccgacgtttctgatgatcaattagaaaaaggaagggaaccttacgcaacatatgtcagttttgcgccagcaaatgatccacagatagctgtagcagcggtagtatttgatggaggtcatggaagtaatattgcatcagtagttaaatcagtttatgatgcttatttcaaggatcaattaaagaatgacacacagtatacttcatcatcagatacatggaaaaaatatgttttaggtaatccatatactcaagaggcaaatgcttcacaggcaaatacaaaccaaactcattagtaaaaatttataatagaaatcttgtatttaaatataaattaataaaaatcaattgatttgtaaggtatctatattaggtatgcaattataaaaattgcataaagtaaacctaattatagatacctttttataaaaaattagatttagtgagggaaaaatgaaatataataatattctaaaaggaaaatttatctcaagaccaaatagatttatagcttatgttgaaattgatggcaatgaagaagtttgccatgtaaaaaatactggaagatgcaaggaacttttgacacctaatgcgacagtatttattcaaaaaaatgataatcctaaaaggaaaactaagttttctcttataggcgttataaaaggagacagaatgatcaatatggattctcaagtaactaataaggttgttcatgaatggatattaaaagggaacctcttaaaagatgtgacgttaataaaaccagaaactaaatataagaattcaaggtttgacttttatgttgagacaaagaatcagaaaatttttatagaagtaaaaggagtgactttagagaataatggaattgtaaagtttcctgatgcacctacggaaagaggtcttaggcatcttagagaacttgttgattgcgttaaagaagggtatgatgcctacgtcatattcgtaatacaaatgaaagatgttgttcattttgaacctaatgtagagactcataaggaatttggagatacactaaaatatgcaaaagagaatggtgtaaatatagttgcagtagactgtttagtggatgaagacagtattaatataagggattatgttgatgtaatattataatgtgatagctgttcaatgctttggtatatacactgcatattatcaaattttgatgttttatatgcttttgtaaaatttaatcaaaaattagtgaaacatatatacaaaaatagtcagtataatgatataattttagagaggttgccattttcaaaacaatttaactattttaacctgcaaaattcattggagggaatgaatgtataataatgatggtattttaataaagggaaataaagatggaataaatacaactatcaatatgaataaatttgcttgttttgatgatatgcttgtattactaataaagaaactttctaaaggaaagcatttttataaagggacaactctaatattaagaatagatttaaaattggttaataaaaaggaagtaggcattcttaaagaaaaattattaactcaaattgaattaaaagatattgttctagaagatatagaaaaggaaattgagcaggtgaatgaaaaagaggttaaggtattctccggtgtatacgaagggaaaactaaatttataagaaagacagttagaagcggagaatgtattaattaccaaggaaacatagttatagtaggagacataaatagtggtgcagaagtatatgcagcagggaatgtaattgttttaggacgtataaggggtaaagtgagcgctgggactaatggaaatataaaagcggtaatagcagcattcctactacaacctgaactattaaaaattgcaaatgttatagctatgtctccagatgatatccaaaagccaagctatccagaattagcaagaattagggatgggttgataatagtggaaccatatttaccaaataaatatatatactaaaacgtcggagggattttttaatgggagtatctattgtaataacttcaggtaaaggtggagttggaaaaacaacaactacagccaatataggaactgctttagcatcacttggtaagaaagtagttgttatagatggagatacagggcttagaaatttagatgtattgctaggattagaaaatagaatagtatatacaataattgatgttatagaaggaagatgcagattaaaacaaggacttataaaagataagagatttgctaatttatttcttttaccaacagctcaaactaaggataaagatgatataagtccacaggaaatgttaaaaatagtaaatgaattaaaagaagagtttgattatgtcttaatagattctccagcaggaatagaacaaggatttgaaaatgctgtaataggtgcggaaaaagcaattattgttgtaaatccagaaataacatctgttagagatgctgatagagttattggtaagcttgattcaaagggattggaagaccattctgttattgtaaatagattgaactatgaaatgactaagaatggagatatgcttgatgtagctgatattattgaaacattatcagtagagttacttggagtagttccagacgataagaatataactatttcaactaataaaggtgaacctattgtgttagaagagggtgcgattgctggacaagcgttcaagaatatagctagaagaattacaggtgaggaagttcctattattgatttacatacagaagagcatcaaggattttttagctccttaaagaagctatttaagcgaaattaagggaggatgagaaaatggggttttttaagagtttaaatagtaagccaacacctaaagaagttgcaaaagacagactaaagctaattcttatacatgatagaggcgaaattgcaccagatattattgagaaaataagagaagagattttagaagtaatttctaagtatattgatatacaagttgaggatgttgaaatatccgtaaataagaatggagatgaagaaggtgaaaatacttctgcattaatagctaacattccaattaaaagtataaagggaagataagtaatttgttttacttaaattataagagatgtttgttttaaagaatgggatggttaattctttaaaacaattcatcttatttttttataataattaggtttattaaatatgggtgactttggagatttaacaagatattatctttaaattattacaaaattattatgttttttatgcccaatataattattatggagaatgcggtaataataatgtataattaagattgattgagttatataagattaatataactaggaggtgagatattgtttagactattaaaattagatatgaaattaattaaagaaattgataagaccatattaatttctttaattcttttaattttatacggaacatttaatatatatctatgcacaaaaggacaatttggattgagttttgtaaagcaacagctgagttggtttgcaatatcacttgtagcgttatatatttttgtggcagtagactataagataatatttaactatgtacctgtattatattggggagttgtagttcttctcatattaactagggttcctgggattggtatagtagttaatggtgctagaggatggatccgtttaggcgtaggtaaccttcagccgtcagaatttgcaaagtttgtaattatacttatgctgggtaagaagctagatgagatggacggaaaaataaatgatgttaagaattttctcacactagcattttattgcatagtaccagtaatatttattgtaatccaacctgatatgggaatgagtatggtatgtttctttatagttttaggaattttttatacaatgggatttgatacgagaattattgctggaggattagcatgcttagtacttggaatagtgattgtgtggaattcaggactcatagaaacatatcaaaaggcaagatttacagcatttttgaatccaagcatcgatgatgcaagtacgtatcatttaaatcagtcattgattgcaattggttcaggtggattacttggaagtagtccgtcactggctcaagatgggattacaacatatgctgcacaaaatgtaccagaagttcagacggactttatttttgctgcaatagcagatcaatggggctttgtaggtgcaattgttttgttaatgctttacggatttcttatatataagatgatttcagtagcgcgaacatctaaagatatatttggctcagttatatgtgttggaatagtgtcatattttctatttgctatattacagaatatagggatgacaataggattactaccaattacaggaataaccctgccacttgttagctatggaggaagttcattgcttacaacagtaatttcaatagcactagtaataaatgtaggaatgagaagaaaaaagatacacttttagaataggcatgttgctataataaatttatacaacaatttcaataagttgagcgctcaattaggagtgaaatgtaaaaaaataattatagtgaatataccaaaattatttataaaataataggattaataattttatcagtacattagaaattgcaaataagaattttgagtacagtatagaattattaatcttattttaatttttaaggagtatatgttataagatagataattttcgaagagtaggtattagtgacataaaaattctagatagtgtattttttcaattaagcaacccaaatgatatctaaatattgcggaatgtagcaaatacaaagattctgcaacaattttgttctcataattttatgaagtactaaatatactttaatgtgaatgaatttgaaaggagtgtatcatgggcagctatagatcagcttatgaggattactataagaacattaataatacaacgaaaggaagaaaggataaaaggaaccatttgacttcaggcaagaaaactaataatgctatcattggttcaagatatgggagtaatatgaaaagtaacgataagatgataaatgttttgattaagagaataactaaggaactaaccggagctacacttttattgctattttttgttggattgaagtataccccttacgcacaagtacaagaaatgcacattaaatgtaaacaagcattaaaccgaaattttaattataacgagtatatagatacctttagtacaatgcagataggaaatataaaaggtaaggatttaaagattggaaattttactgtagatgatttgaaaattgaaaatttaaagtcaaggacttttaattttatggaatatataagaaacaacagtaatatgaacaattaaatttataagaaataacatattattatgaatataaaatatattttaatatttgattaagttccattttttacttgtgcattgcaaattattttgatatagcaatattataggggttagaaatgaagaaatggtatatggtattgattttagaactgtcgatattaatgtggcttggagattatgaaggctacattgttattagttttctatgggtaatattgcatgaatttgcacatatgatagttgcaagtaaatttgggtgcaaatttaataatgttaatattagcatatttggtgctaaagtcgaattaagtgacatcgatgagttaactgaaagaaaaaaaatgattttatatttagctggaccattttttaatatttttatggccgtggttatgtgctatttatatggatattttaagtatcaaattattgaagatagtataaaagttaatttctttttaggagcattcaatttattgcctgcttatccccttgatggttcaagggtatgtgaaatactattatcaaagaagctattatataaaagatcaaaaaaaattacggaaatctttagctttattatttcaggaacattatttttaatatttattataataatgatattacataaagttaatataagtttatttcttgcagtcatattaatcacatatgcaacatttatagaaaaagaaaaaactatgtatataataatgggagatatgatcaagaaaataagaaagttaaaaaagcataactatatagagaataaatcaatttctgtgtattataaaaaaggtttggttaatgttttatctttagttgataaaaacaaatttaacagtttttatattcttaatgatgacatggaactcattagtataatacatgaagatgagcttataaaagcattaaaggattatggaaatataacactagaagagtatgtgcaattaaaaaagaaaaataattaagctcattaaaaaataacagaaacgtaatggtgatttaacttactttttttataattgaagcatgtgatgaagagtaataactagtaccataataaaaatgtatcttttatgtgtgaaaatgcacttttgtagtgtgattcagacaattacttatttattactctctaaatgcgattaaaaagggtaggagcgttaatatggatactttacttcatgggaaaataggttattttcttagcaaggaattaattgagagaggctactcaaacattattgatagtaacttttttatttatggaaatgtgttacctgatttaaagctcaaatatagaatgactatgcatagtaaaaatgaggattgggagaaggttataggaattattgatgaaataatttatggtgaaattaaaagaaataaggatatttcaattaagctgggaatattgagtcattacctatgtgatttttttacttttccacataataaagcttttgaaggaaatattattaggcatgaattatatgagcaaactcaaagaattttatggtggaaaaagctatctgaagtgtggaatgaatgcacagaggaatccagaatagaattaaagtctatgaatgatatagtagattatattgaagatatgcacagtatttatattagaaatttaggagataaaaggcgagatattttttttagtaatattttagtgagagtagtttcgtcatctatattaaggataaaacaaaatatagatgaacataaagtagaagaaaatattaatagatgcatagtatgataatagttagaagtgtggagttaataattaaaattaattattaactccatttcttatatagaaaattttagattttttatgaattaccaaaatttaaaatactaatttattgctttaacataggtattcaaaagtaactgtataaaaatttgtgaaaaaattataatttaatgcaaaattttcatatgaagaatcgtattatatttagatagtataaaaaataactcattattaaagattggaggatatttatgaaaaagaaagggattataagcgggatattaacattatgtttaatattgtctactatttctattccgacatttgctgcggatgaagatagcaaaaacttagagcaagctatcatatcagcaaagaaaattataacagttccagatgattatacagagttcacacataattcaagcgaacgtgaagtaagggggactaaagttaggatttgggatttaaattgggcagaaaaagaagataagaaaggatcaatatctgcatcaataggtgaagatggattcttatatcaatatagtaattatgatggggatagcaaggatagcaaagacggtttagcaaatattacgaaagatcaggcccaagtttcagcagaagattttttgaaaaatgtaattccagaatatattggggaaataaagttagtaaaaaatgattcggctccttttcaaggggatgagtataactttacttatcaaaagtttgtaaatgaaattccggttaactatatttatataaatgttggtgtaaataaatacagtgggaaagtgacatcatttagcaatgacaatttagaagtaaagggagctgaatatcctaatttaagtgggataattgattctgttactgcagaaaaagcatatatagataaaataggtatagatttaaaatattattcttattatgattatgagaagaagaaaatgaatatatttgcaggatattctccaagtaatataagtgaatttattgatgctaaaactggacaagtagtatcatattcaagtgataataaattagatgatagaaataaggatcattcattagtaaatgcttctgcaaataatttggataaagcaaatcaagagttgacgcaagaagagatggatgcgattcagaatgttgcaaatcttataagtaaagaaaaggcagaatgtatacttagagaaacatctgatttaataacggctgatatgaaagttagtgatgcatcattaaataaaaactatcttgatgatgaatattcatggaatatttcttttgatggtgtatatggaagagtggatgcaaaatctggagaagtaatatcgttacattcttataattataataaacttggaacaagtggtgatacttctaaggcagatgcgcaaaacaaagtagaaaattttttgaaaaaggtagcacctaataagttcacacaaacaaagtttaaggatataaagagtccaattttaaagattactgatagaccaatagaagaaaatacttttatgtttaattatgtacgtcaagtgaatggaatagagttttctggaaattacttaaatgttgaagtagataagaatacaggtaaaatcattggttatgataataactggtatgataatgcctcttttcctgacattagcaatattataagcaaggaagctgcatttaataaaattaaagatttagcaggattttcattacaatatacaatgttggatgcaaataaagttggaatagtgtatgactttataaacaagaatgatagctacattattgatcctataaatggcataaggatagattatagtggaaaagcatatagagaaaataaattaccagaatatacagatataaatgggcattggtgtgaaaagacagtaaaagaacttttagataatgggtattatatagatggggaaaaatttaatccaaatatggatattactcaaataaatttctttaaatatatatactcaccagtaaaaaataactatagcgatgatgaattttatgatatgttaattcaaaatggggtaattaaaaaagaagagaaagctccaaattcagtagtatcatataatgatgcagcaaagtttattataagatacttaggctatgagaaattagccggacattctgaaatatttaatagtccttttaaagataatatagaagactcatataaaggatatgcatcaatgtgttatgctcttaatattattaaaggggatacaaatggaaattttaatgggtcgcataatataagcaatgcagaagcagctgtaattgtatataacttgataaaaaataacggaaaatagatttaatgaaagtgctaatctttttatgaggattagcactttttgttgttgtaggttgagatgtggaaataaagttaataaattagtataatatgatgtaaacaacatattttatatgtgaaaaagttattgtttagaattgatattacataaggagagaatggctgatgttaacatttatttttttactagcatttcagggattttcaggtggagtagctggatatatcacaaataaatatgcagttgatatgctttttaaagaatatacacctttaaagctaggaggggtaattaaaaagaagaagaagaaatttattgaagagattagcgaattagtagaaagagatataataaatgcagatacattaaggtctgaaatgcctaatataaatatagatacatatattagacaaatggctcaaactttttttgagaaacaattaagcaatagtttaggaaatactaaaatagctgaaatagatggtttttcagagagcatacttaaaagtgaagaatttataagaaataatctaaatatgcttttaccagaattaatagatggtcttatgcgtaatgttgatctacaagatatattaagtgaaaaacagttatcaaaagttataaattcaggctatgagctgctgatttgcgaacttgaaaagactgatgcggtaaatggatttatttctaatttatgcaaggaaaattcgaatactactttagctgatattttttctaaagaagtccagaaaaaattaactgataatattatagagtgtgttgaaaacatatttaataatgatattttatcagatgaaaagtcgtgcaagatgtttttggacaatatgctttcaaatataaatgtagatgcaacgcttgtcaaattacaagactctataggaagccggaagattaattattttattacggaaactcagcaagaagaagttatttcaagattattcattaaaattactgaatttattaactcttctgaaggaaaggatttagtattaaaaattacaaatgagattgtttcaattgggaaaaatattgattttactctttatgaaatacttcctaaagagatagaaaaatcacttacgaattttgtaaaaatagctattcctaaggttatgccttatattttggagtggatttcaagtaataaatcatctttggatgaaatgattgaatccgcaattgatgaagcaatacaggatatagatgaaagcataaagaaacttataatctcaaaggttagaaatgcacttatgggagatgtttcatctaaaaataatattgttaataaaattataagctatattaataataattttgatgatgaatcaagtgataaaatagtaacttctattatagattacttgaaggacaccaaggttaaaaacatagtagaatcattggaaaaatacaatttagctacatctgatgatgttgctgaaattattactaaagtatttgcagctcatggaaagaatacgttgaggatactaataaaatctcaattttcaaagaaagtaaatgagattgctaagttagatttgttaaaattattcaatacaaagtttaagccaatgttatatgaaagtatttttaaaaacaaaacgagattatgtaaaaacataaatactttgattgcacaattcataaattcaaagagtgatgaaatattccacaaaaaattatcagaattatttaaagataaaagtgtacttagtttatctaataaattttcaatatgggccaataatttgctcagaaagaacaaagatacatatagcgagagattagaagatattatattatcaaatgttaaaaaacttaaaataggagatatattatcaaactataatgtgaacatattggaatatattgtggataattcagtatcaatttatagagaaactgtggataaatataagaattatcaaattaaggaattagttaataaaggatttaataaggatcaattatcaaatattcttataaataaaggttacccggcattaatatctaagcttccaattctattaaatggaaatattaaaaaaatcgcaaaaaatagtttgagtaaatatgacgaggatgaaatatgcgatatagttcaagattttatgggaagtcaacttaaaccactttctgtttttggtgctgttttaggtactgtggttgggataatatatcaattaatatttccaaattctattggactttacggatttccaagtaatatgtttaatggattgttgtcacttggagttatggcatttataggatacataacaaatgttgtagctttgtggatgattttccatccatacaaagaaaataaaattatatctaaaataccattttttaagaagttcgcattaggatatataccggcacataaaaatgagttcgcaattggaatggcgaaactaattgatgaagaattattaaacaaagatgaaattaataaaagtttcaattctcataaagataatatgtcttcagtactaactaccttagttaaaaataataattatcaaattttagttaacttttctagaagtaaaaagaatgattttgtaaagtatatttataaaataattttaaagtattgtaatactagttcagatttatcagaaggaattactaacaaattaaaagaaagcaaatttgatgattttatcgaagaaagttacattcagaatggaatacttaaaataataagtagtattagtaatagtaaaagttctttaacgaagtttatagaaaatagaatatcttcaaattacaaaattggtgatgttatttcagaagatatacttattaaaatccaaaattatattcaagaggaaggcaataagtttatacaagataatcttagcactattaaaaaggtagattttttagagttaattacaaaggaatacaaagatgattattctgcagcgataaaacaatcgtgtaaagaggttataggtaaagattctatagaaaaagcaaaagttaatatagggaaatatgtatatgaatatctttctaatgactttaaaatatatttagaaaatatgacaagtaaatatttatgtaatggcttagatgaaaataatgatataggatcaatatttaatggtaaggtcaagaacatgattgataataacctgaatcatataacatattatttttcaaataagttaatagcctacttaaaaaacaatcagaatattataactgaaaatgtacaagaaactattaagagtgaacttaatttctttgagaagatagcctatgcaacttttggtggagatgacatagcatatagagttgttgatattatactaaataaaaaacttcctttaatgctaagagaagagaacgataaacttattaatactacgaaagctgtattaaatgaaaatatataccctattagagtgagtgaattaaatataaagggtgaagaatttaacactcaaataataatagatgatttatttgagaaatttggtgagaatgctaatttaaagagttatatctatagcgcaagtgatctgattttagattcattagctgtggcttcaatttcagaatatcttgaattatttgaattaagcactttggattcgatttataagaagttttttgatgaagtcaatatcataaaagaagatatatatagaagcataaatattaataaagataaattatctataacaatagaaaagttctttaatgaaaatatggtgaaaaatttatttaacattgaatttaattctgtattattaaaaggaattgatatctatgaaattgaaaattgtataaataatattttaagcataattgttgagagtgaagaatcaaaaaaatcgatatctatgtttatggaaaatttctatgaaaatacattatcggaattaaagatagaacaaattattgatgcaagtactctaagcaatgatcttgatagggttattaaatatattttcgctaatgcagaatttaaccaaaaaattatgattgcaattgatgctatagttcaaaatgcaattaataacaacttttactttatatcagatagatctaaggattatcttataagtaaaactattgaaacaggtttaaattcagttggtgattatattgtgccaatattaagggaaataaatctaaagaatataagcaataagcaaattgagctgctcaatccaaaggaaattgatgtaatgttcaattcctttgcaggagactttttcaataagcttcgcctttatggagtgtttggatttgtatttggtataaatgccggattatcatttatattatggataattgattggagatatagcaagaaatacaatgataaaaattcaaaggctttgaaggaaatgtagaataaaataaattgtatatagtattggaaacaataagaatattcccattcagaattaattatgttagaatagggatagcaaataagaagtatagcaatcagagtttatacttcttttatttatgcataagcaaaaagtgggttcatttagtatttgaaatactaaaggttttaaattctttaaatttgacaaaaatttaaaggcaagcatttatggagaattgcacatatgatggtgtgttttaaggaggaaatttattaatgaataaaatttcagatgatatcttatttaaagttgaaaaaccaagtagatacactggtggagaattaaatgagattgttaaagatctaaaggaagttgacataagatttgcattttgctttcctgatgtttatgaagtaggaatgtcacatttaggaagcagaatactttatcatactataaatcaaagaagtgatacatattgtgaaagatcatttgcaccatggcctgatatggaagagcagcttagaaaaaataatattccattatttacattagagacaaaagattctctaaaggagtttgatattttaggattcacacttcaatatgagatgagttatacaaatattttaaatatgcttgatatgtctggtattactataagagcatcagaaagaggagaagatgagccaatagttatggctggtggaccttgcgcatataatccagaacctttatatgatatcattgatttctttgaaattggtgaaggcgaagaaatgatgaatgatgttttagatgtttataagaagtataaaggaaaaggaaagaagaaagaattcctaagagaaatatctaaaatacaaggaatttatgtgccttccttatatgatgttatttacaatgaagacaatacaattaaagaatttagacctaagtatgatgacgtaccaaaaactattacaaagagaattataaataattatactaaggtagattttcctacagatataatagttccttattcagaaattgttcacgatagaatagttctagagttattcaggggatgtacaaatggatgtagattctgtcaggcaggcatgctctatagaccagttagagaaaagacaagggaagatttaaaggatttagcaagaaaattagttaaaagtacgggatacgaagaaatttctctttcatcattaagtacttgcgattattctgatataaaaggattaattacagatttagttaatgagcatgaagacgacagagttggtatagcacttccgtctataagagttgatgctttttcagtagatttgcttaaggatattcaaaaggtaagaaaaacaggattaacttttgctccagaagcaggttctcaaagaatgagggacataatcaacaagggtcttactgaagataaaattttagatgcagctacaagtgcatttgcagctgggtggaaaactttaaagctttattttatggtcggacttccatatgaagagcttgaagattgcagaggaattggggaattagcagaaaaaatagtatatagatataaacaagtgcctaataagataaataataataaaggtttaagacttacagtaagtacatcaatacttataccgaaaccatttactccatttcaatggtcaccaatggcgaagtttgatgaggttactgaaaaaatcaaagctgttaaatcttcaattaaatcaaaatgtatagtttataactatcatgagcaaaagacatctgtaatggaatctgtttttgcaagaggggatagaagattatgtggtgttttaattaaagcttttgaaaagggtgctagattcgacggttgggatcaacactttaaatttgacgtatggatggaagctatagaagagtgtaatttagatgtagatttctatgcatatagagaaagaagctatgatgaagtattaccatgggatttcattgatattggagtaaatagaaaatatttagaaatagaaaatgaaaaagctaaaagagcagagttaacacaaaactgtagagaaggatgtacaggatgtggaattaatgtgaactttaaagatggggagtgttttgaaggtgcgatacttaactaaatttactaaagaggaaaatattaagtttatatctcatttagatgtacttaaaactattcaaaaaaatattagaagagcggggctaccaatagaatactctcaaggatttaacccacatatgaatacatcaatagcacagcctttatcagtaggagtgtattcaagcggtgaatatatggatatggtgttaacaactgagatggatgaaaatgaaattgtggataaattaaatgatacggcaccaagtggaataagatatataagtgcacttgcaattccttataaagaaggagaaaagaaagttccacaagctatggcattaattgatgcagcaagatatactataaaaattaagtattctgatgtttcaaatttagaagaagaaattaacaagcttttagaaattaatgaatggaatacagtaaagaaaagtaaaaaaggtgaaagagaagtaaatatacgacctttgattaaggaatttagtttctggattaaagatgagttcttaattcttaatgtagttataagtacaggaagtagggaacatttaagcgcagatttacttgttagctatatccagggaaaaacttcaaatgcgattttggattcgtttgttaatacgaaaagagaagaaatgtatttctacaagaataataaacttgtgccattatataaatgtgtgtaaatatataattcacaatttacaatgcgcaatacacaattaaggaataaatctcttgagagagtttaaaaattataataaatgaaaaatactaaggtatcaagttatatgataattaaatttccaaaggaaattgcccactaattgtgcattgtgaactgtgcattgtgcattgactaggatgtgttatagaatgaaagagatttttgttgagagaagagaaaaaattttaagggtagctattaaatctaataatgaattagtagaaagcatcgttgaagaaagtaagaatgaaccgataataggagaaatttataagggaagaattaaaaatataattccggctatcaactcagtatttgttgatttgggtttagataaagaaggttacctatattatagtgatgaattaaaggcaaaaggaataaaaaagggagacgatatactagtagaagttttaaaagagcctcttaatgataaaggcgccaaattaactgcaaaggtgtcaattcccgggaaatatattgtcttaaattgttatgaaaaaggaatagaattttctaagagaatagaagatgaagagaagaaacagaatatattggggaatattgaacctctaaaagatgtttgcataacagtaaggacagaaggtgcaaatgtagaaataagtattcttaaaaatgagatttctaagctttataatgaatttcaaaacatagataaaaaaatgaagcattcattaggagtaaaaaagctttatggtgaagatttaacattaactaagcttttgatgaatttttctggagaagaaattataaaagtttatgttgataatgacattgattttgataaagtatcaggctttgctaaaggacaagaaaacttaaagatagaaaagtatgaaggacatagaaagctttttgatttttatggaatagagaaagaactattaaaattaaggcacaataaagttaacttacaatgtggaggatacatagtaattgatagaactgaagcaatgtatgttattgatgttaatagtggaaaaaacataaaggagaagagcttcaataaaacaattctggaaactaatttagaagcagctaaagaaataggaaaacagattaggcttagaaacttaagtggaattatagtaatagattttattgatatgagagataaaagtcaaagagatattgtaatggatgcacttaaggaaagtctgaagttggataaaggtaatgtaaaaatattcccatttactcagctagatttagttcaaatagctagaaagaggcaaggaaaaagtatatatgaatatatggaagaagaatgcaacttatgcaaaggaagaggaataatcctaaagttatcttatattgaaggattaataaaaaatgatatagtaaggatgcaggaggaaagttccataaattgttttcatatacaaatagatagtgtttataaagatagaataagagaaaatatttttgagtttatgaaagaaatagatggattagataaagaaatatatctaaattatgtagataatatagaaggatataaaattgaaccacttatatttcaagggcaaaaagataatttgaaagattataaagttacagctatagaaaagtattaaatcagttaataatcatgctaaattatgtttatatggataaattatagattatgctttacaaagtactagaaatatgataaactggcttttgtagaccgcgcacgtaaggttttatgtaaaacaaagttgaatctttgtaccaaaagtggcgagaccgttatgaggaggtgttttaatgtacgcagtattagcaacaggaggaaaacaatacagagttcaagaaggagacgtaatatacgttgaaaaacttaacgctgatgttgattcaacagttgaattaaacgaagttttagctgtaggaactgaggaaggtatcaaagttggtgcaccagtagttgaaggagctaaagttgtagctaaggttgcagcacaaggtaaggcaaagaaggttatagttttcaagtataagtctaaaaaagactatagaagaaagaatggacacagacaaccttacactaagctagtaatcgaaaagatcgaagcataataaaattatggttaaagtaaaaatcaaacaacataatgataatattgttggattcgtaataaatggtcacgctataggtaatgaccgagacttttcaaatgagcctgctttggtaggagaagcatttgatatgatatgtaattcggtttcagttttatctcaaagtgtaattattggtttggatgaagttttagaatttaattcaacatacgaaatacaagatggatacttgaaattagaccttcaagattttaatctagaagaactaaatcaagctcaagttttattaaaaacttttgaaaaaagcttggaaagtgtaattttaggatttgatcaattagtaggggaaaagaaacgtagagaatatataactttaataaaagaggaggtgtagtcacatgctaattatgaaccttcaattattcgctcataaaaaaggggttggtagttctaagaatggtagagactctgaatcaaaaagattaggagttaaatctgctgacggacaatttgttcttgctggaaacattcttgtaagacaaagaggaactaaaattcatccaggtgaaaatgttggaaaaggtaaggacgatactttatttgctaaagttgatggagttgttaaattcgaaagacttggtagagataagaaaagagcaagtgtttacccagtagacgttgaagcaatagctgaataattattttagaaataaagcactcttagtttaagagtgcttttttaaggcatatgaaagaaaataatgagttaagaaggtgccgatgtctagagtgacagatatcagagaaatagactagcattttatatgttattttctttgatatgccttaatatttttatgataatatatattgagattagacattaaatccaatattatataataaagcgatattttttagggaagaataagtaataatagaactaaaaaattttatattaagaagataaagtaaaacaaacaaggaaaggtgatttttatgtttatagatacggcgaaggttttcgttaaatctggtaacggtggtaatggtgctatttcatttagaagagaaaagtatgtacctctaggtggaccagatggtggagatggaggaaaaggtggcagcatcatttttcaagttgaaactggaataacaacgttattagactttaagtacaagaaaaagtttattgcagaatccggtgaaaatggcggcggttcaaaatgctatggtaaagatggtgaaaatttatatataaaggtacctatgggaactattataagagaggcagaaactaataagataattgcagatctttctcataagggtcaagaattagtattattaagaggtggaaaaggtggaaagggaaatgttaaatttgctactgctactaaacaagcacctcattatgcagagccaggaatgccaggagacgagttaaatatagttctagaattaaagttgcttgctgacgttggattattaggattccctaatgtaggtaaatcaacattgttatcaatgacaacaaaagcaaaaccgaagattgcaaattatcattttaccacattgaaacctaatctaggagttgttgctgttgatggaattgatccttttgtaatggctgatattccaggaataattgaaggagcagcagaaggtgttgggcttggaatacaatttctaagacatattgagagaactagacttttaattcatatagttgatatatctggtgttgaaggaagagatgcttttgaagatttcgttaaaatcaatgaggaattgaagaagtattctgtaaagctttgggatagacctcaaattgttgtggctaataaagctgatatgctttatgatgaaagtatatttgaagattttaaaaagaaagttcaagaaatgggatttgacaaagtatttaagatgtcagcagctactaatgaaggtgttgatgctgtaatgaaagaagcagcaagaatacttaaggatattccagttaaagaattagaaatctcagaagatgaaatgtatataccagaagaaaagagatttacttatgatattactgttgaacataataaagaagagggatatgatgtttatatagttgaaggtacatttgtagatagattactaagtgcagtaaatgtaaatgatgcagattccttaagatacttccataaggttcttagaaataaaggtatttttgatgagcttagagaaatgggtgtaaaagacggtgatatggttagattaaatgattttgaatttgaatatatactttaattaattcaaatttaatattatatattgctatataaaaatgttctgcttataattgagtgctgtgaaatttaagttataagttaaaaaaagacccccagggataattaatacaacaaatatgttgaaaaattttaggaggaataaataatatgttaacaggaaaacaaagagcttatttaagaggattagctaatgatatttcaccaatatttcaaataggtaaaaatggtgttgaggaaaactttttaatacaagtttcacaagcattagaagctcgagaattaattaaaataaaagttttagagaacagtggattagaaacaagagaaacttctgatatgatatgtaaagctgtaaaatgtgaaggaattcaagcaataggtaataagatagttttatataagcaatctagtaatttaaaaaagagaaaaattgaattacctaataaataattatatataggaaataattaatagagaagctgcttttatagaagcttctttttttataaaaattaagatattaaaaataatatttaagtttacttcatgatataataaaaaaggaatttttaatatgattataattagtatattacttttggaggaaatcttatgaaacgctttggtataataggtggtacttttgatcctattcataatgcgcatttatatatagcctatgaagctaaagaaaaattaagcttagatgaagttatctttatgccggcaggaatacagccgcttaaggtcaataatataattacagatcctggattaaggtatagcatggttaaagtagcaatagagcactttagcgagttttctgtatcagattatgaaatagagaagggtggacttagttttactcatgaaacattagagtattttaaaaataagattagtgctagggataaagataatgaattgttttttataactggagcagattgtttgttcagtatggaaaagtggaaggaagtagaaaaaatcttttcattagcaactcttgtagtattctcaagaggaggaataaacaaaagtgatatgataaataggaaacatattatagaagaaaaatataatggaaaaataattgttttagatttgaaagagcttgaaatatcatcaactgatataagaaatagagtacatgaaaataagagaatagatttttttgtgccagagggagtttcagatattatctataaaaataagctatatagatagaatttcataaagctaaggctctgggatttatagaaatataagtttattcatttagaaatatatttaattttaggaggaatttatcttgttatccatagaagaaatgaatttgtatcttaaatctaatttattagaaaagcgttatatgcatactttaggggttgcagacacagcaaagaggttagcaaaactaaatggagtttcagaaaagaaggctgaaattgcaggtcttgcacatgatgttgctaaaaatttatctatagataaaatgagagaaatgatcaaagaaaataatgttattatatctgagatagaagaaaagaatatgaatttatggcacagtattgttgcgccaatagaggctaaagacagacttggaattgatgatgatgaaatactggatgccataagatggcatactacaggtaaagaggatatgtccactttaacaaaaattatttatatagcagatatgatagaacctggaagaaattttgatggggttgatgagataagaagagctacatttgagaacttggataaaggagtctattttggtttaactagtagcataaaagtattattggctagaaacttattaattgatgagaatactataaaggcacgaaattattttctatttaatcctgaatttaaattataagtattgatataaatagaaatttcgatttatttaatgagattagagaggttacttaatgtatattatattaagtaaagaaaatttataagaggtgggtgcatgagaaggaaaactaataaaaagagagatacagcattcttaaaaatttttaaaaagggtaatgattctacaacagtatttgaaaagttagttttaggtattatatctcttataataacttttgttatagtatcaatggtatctggagtttatgctttaatgaaggttgagagcaagtcaatgccaagtggtgcaagtgtatcatttaatcagccagtaaatatcttgttacttggtatggatataggagatccaaagcaggtaaataatcaatcaataaagagaacagatacaataattgtagctaattataatcctcaaaccaaaagtattcgtattgtgtctattccaagagatacactaataaatataaatgatagaaatgttaaaataaattcagcttatgcaattggtggatatccgaagataaaatcagaagttgaaaatctactgaatataaatataaattatatagttaaagttgattacaatgcttttcgtgaaatcattgatgctatcggaggaattgaaatgaagatcgatagaaatatgatttatgatgatgaaggtcaaaatcttcatataaattttaaagccggtgaaactgtaactctagatggtaaaaaagcagaagaattttttaggtggagaaaaaataatgatggaagtggacttgctaatggagatttagatagaatagaaaatcaacaaaaatttatttctaaggttattgaaaagtgtacaagtccttttgtaatatttagagcacctaaaataattacagcattaggagataatgtggaaacaaatctgtcaccaactgatattttaggatatgggtttaaatttattggtataaaaaaggaaaatgtaacaatggcaactgtaagtggaacgccgaaaactataaatggagagtcatttttaatagttgataaaaatgaaaataaagatatattatcatcacttacttcatcttctgcatctaataaatcagcagaaggagcagcaaaagatgatataagaattaaggttttaaatgctacaaagattaatggattggcggcaaaagtggcaaaggaattaagtgatgctgggtatacaaaagttgatactggcaatactgaacttagtgataaaagtgaaatacttagtaatgatgccgataaattaaagactattaaacaggatttaaatataaaagaaaatgatgaaaaagagaacaagaaagaatataaagattacgatgtgattataattttaggtaaggattttgaaaccttcggtaagtaaagtgaattagagttttgtggtggctcaacgaaataagtaacatattatgttccggtttctagtatagtgatgcatataaacttaatagatatgtatggttagtaaaaatacaaagatattagaatgagtattatcgttattgtgcatcatcaatttgacatattcctaaattatactatatgaggagaagataaattatatgagtattttagaaaaacaggttgttaacatagagaagggcactaaaataagagaatatttgaaagtggaacttggcttatcaacaagattaattagaagtgcatctcttggtaaaagaatatttgttaatgatgaagttgtaaaaatgaatagagttctaaatgagggagaaattattaaaattgatttggaaaaagatgaaagtcaggatatagctccagaaaaaatggatatagatatagtttatgaagatgaagatattttagtagtcaacaagaaaccttttatggtggtgcatccaactaaaagttatcaaagtgggactcttgcaaatggagtaatcaattattttatggagagcggccaaaattgtatagttagattagtttctagattagatatgaatacatcaggtcttattataattgctaaaaatcagttttctcatggaatgctatctaaagaaatgagtgaaaataaggtggaaaaaaaatatttagcattagttcatggaattatgaaagaaaaacaagggacaattgatctaccaatatataaacctgaaggaattgaaaatggcattaggagagttatcgatgagagaggtcaaaggagtataactcactataaagtcgttgaagaatacaatgaatcaagtttagtagaatgcaaacttgaaactggaaggacccaccaaattagagtgcatttaagtcatttaggtcatcctatttacggtgatacattatatggagatggggatgaagaagatttaataaagaggcaggctcttcatgcatttggattagattttaaatctccaaggagtggtgaaatactttcattaagagctgaacttccagatgatatgaaagaattaattagtaaattgaaataaatttaatatgataagtaataatgtaaaaagctcaagcatctaatttaataggttgcttgagctttttacattattctattgtaagtatgattccataaaacttcttgataaatttaagaattcttttagagcaggagagatccatttgtttttgtgataaagtacttgagatattattccaaagtcaggaccttcccaatttagaggaacaagtttaccactatttatttcatcatcaacagcaacctttggaagtaaggttattccaagaccactcattgtaaattgtttaatggcttgaacacttcctgtttctatggctacatttggttttatattgcagctacttaagatgttttctaatgtagctctgtagctacatcccatttctgttaatataagtgattctgactcgatatcttttggaaatacttcttttttatttataaggggatggccagggtaggctaaaagcaacattggctctggaatttcaatttctgatataaattcttctgaattaatttttacacctaatgaaaatgctacatcaataatattatcatttaagaaatatttaaattcagcacagtttccaaattttaaagaaatttctacttcaggatatagctttttgtattctttaaggatttcaggaagtcttaatacacataaagattcagcagcaccaattgttaatgtgccacttggaacatcagtgttaagtacagcattttttacatcacttgatagctttaatatttgttttgcatatggcaaaagtttctttccttcatgtgttaaagttatgtttttacctattctttcaaaaagttttacaccaagctcactttccaaaagcttaatttgtgttgttatactagattgagcatagcccaggctatcagccgctttagtaaaactttgaagtctgcttatcgttaagaaagcattaagttgtttaaaatccatataatcatctccatcaaaataattgattatgttaatagaaattatcaattttactaatatatgcataaatgatatcatacttataatagataagcaaaattaattttaagaggtggttttaatgggagacaagttgaaggttggtataataggtgccacaggaatggttggacaaaggtttttatgtttattggagaatcatccttggtttgaagttacagtgctagcagcaagcaaaaattcagcaggagtaacttataaagaggcaatagctaatagatggaagatgacaacaccattacctgaaaaatataaggatatggtagttaaggatgcatttaaagttgaagaaatctctggtatggtggattttgtattttgtgcaatttctctaaataaggaacaaactaagttacttgaagaagattatgcgaaacatgaaactcctgttatctcaaataattcagctaatagaaacgtagacgatgtacctatgttaattccagagataaatggggtacatgcacagattattgaaagccaaaagaaacgtttaggaaccaaaagaggatttatagcagtaaagcctaattgctcaattcaaagttatgttcccccaataaatgcccttatggaatacaagccgcaaaatattctggcatgcacttatcaagccatttccggagcaggtaaaacttttaatgaatgtcctgaaattattgataatgtgataccatttattgatggtgaagaagagaaaagtgagaatgaaccactaaaaatatggggacaaatagaatcaggtaaaattataaatgctaatggtccgattattacaactcaatgtataagagtacctgtagcaaatggacatttggcagcagtttatgttagttttaagaacaagccttcgaaggaagagataattagtagatgggaaaacttcaaggttccagaaatagttctaggtcttccaagtgcgccaaagaaatttttgaaatacttcacagaaaataatagacctcaaactaatttagatagagattatgaaaatggaatgggaatatccatgagaagattacgagaagataagatatttgattacaaatttgtgtgcctttctcataatacattaagaggtgcagcaggtggtggagttctttcagctgaatatttgaaagcttgcggatatttaaatgcaaaataaatttttataattaatatatatttaaataaaaataaaggaagtcatctgttacttcctttatttttatttctttaattttatatttataagcttccgtaatccaaatactcctgctaaaacaatagcgacagatcctatatagagttctgaatttgcattgtttgacaatgaattaatagaaagaggaaattcatactttctagatgtcccggcagctaaatccatagttgtatattctttatcattaacataaacggtaccttttagtatgttatcaccttcattaaatgattgtttgcttaaatcctgatcctgtatttctatttcagaagatactgaattttcttgacctttaggaacatcataatcgatatcttttgaagccaaaacaggtattgtaagattattagttattttgtactgagaaacctcatcaccttttttgtaaaggtgaactaaagaataattatcaaatccgtaatttaagactgcttgcatgtcatgaaagttttgatctttatcaagtgcatttaaaaatgaagctacaagaacatgtccgttcttttctgcagcagctacgtaagtatgatttgattttgttgtataaccatttttaccgcaaagagcaaaagggtaataatatctagaattcttatttatcatataatttttattgttaagtacaatagtctttgaggggttattcttgagcgttattgtgtaatttggtgtagtggatagttgaacgtaatctttattatttatagcttctcttaaaaataacgctaaatcatgtgcagtagttgtatgttctggatctggtaatccacttggatttttaaagtttgtgtgtaaagctcccagttcttttgctttttcgttcataagtttagaaaatgcttctgtgcttcctgatatgtgatcagctaaagcatttgcacaatcgtttcctgattccaaaagaagccctaaaagcaaatcgcgaacagttactacatcaccttttaataaaccaacagcagttccatctattttggtgaaatcttcttgaactgtcacttcatcatctaggttacacttttctaaagttataattgcagtcataaccttagtagttgaagcaggttctaaaaccttctcttcatttttcccatataacacctggccagtagatgcatcaattaaagcgcaaccctcagcattaatctgtggaggctgtgtttctgcttgtacgctattataggtaaagcaaaataaaaacaagaacaatatattaaatgttttaaaaattcttttcataaaattctccatacttatattaaatatttttaatcgtactcaaaatacattttatcaaaaaaaaggattttgcgctatacaaagttcaaatagattccaataagagtctaaataataaaaaaatgggaataatatttaaagagaaattgtaaaggagaaaaagaagtggtacaagagttcttaaaggataagaaaaaaatcggcatattaagtatgctatttattgtagtaattgtacttataggattatatgtgaaatctgggtttaaagaattaaagaaaaatgatacagaaagtatttttgtagatgacagtattgaagctgatacatcaaatgatgaatcggttaatgctcaaaataataataaatcaaatagtaaggatagcaagaaacaaatagttgcagcaaaaaataagaacatagttgtagaaataaaaggagaagtaaaaaagccagatgtttatacaatgagtgaaaactcaatagtaaaggatctcatagacatatcaggtgggcttacagaaaatgcagatttaagtaatataaatagagcaaaaaaattgcaagatcatgaattgatttatattttaaacaaaaatgatgaaaacaaggaaatacaaactgtaaattcaaattctagtaataaagatagttcagataaaaaaattaatataaatagtgcaacattagatcaattaaagacactaaatggcataggcgattcaaaagcaaaaggtataattgaatatagagaaaaaaatggtggatttaaatcaattgaggaaataaaaaatgtatctggaataggagacaacatgtttgagcgaataaaggaacaaatcgaaatttgaacaacttacaaatatattacattaatgcttgttaacgttataataattgcatgaaagagtaaaaaaatatataataaacagtgttatatcaaaactaattatattaaatgaatgtaaaagcaatctagaaaagagaacataatattatttaggtaagaaaaaaggtataatattgacacagagttgtaatacactgatggtaaaattgtattattcatttgccgtatattagttagacataaaaataacatctaatttaaataagggggaaaatttagtgtctaaaaaggttataagtatacttatgagcataatagttgcagcatcattagccgggtgtaaaaatgctacagatagttcaacaaagaaaacggacacaacaacggaaagtagcacaaactctaatgatgacagtttagagggaaaatgggcaaaaaattatacattagatcaaacacaaaagttatttaaagataaattatcaaagatggagaatataaccaaggatttaggggtaaaatatacaaaagatgagaaaacaagaaaagaaaaggatgaatctgtaaatgataactccatatattttgacaatgagaagccagaggtaaataaaattgaaagtatgtattttggaatgaagacatatggtgataacttagaaactggtgatataagtctaaagttgagcttaaattttgatggtgagagtgcaataaaaaataataattttgacttaggaaagacatcttttaaaaagtacatagaagcatttacagaccaagaaggtagagattattcagacataaataaacaaataattgataaattaaaaagtggagaaaatcaagttcagattgataacacaattgatggcttaaaagaagaaatcttagctaccaaaacgtgtataatatataaattatctacaaagaaatacaaatttgctgatggtgaaatgagtatgaagtagattacaagggggaaaattttttggaaaaagataacttaaatgaaaatgaaataaacgatgaagtggaagaaaacgaaattaaaaagatttcggatactgaagaagaaacagataacaatgttaataaagaggttgaaagtttaataaccagtgatgaagaatcagataaacaatcttcttctaaaattatattagctaacgcacttgatcagttattaatgattgctggttcagctttattagtactattgtgtgatataatcttaaaattatgtggatacatgttcgtaagggataatggagctataattttagcaggaggaataatatattttattataaattgtatttatgccccaataatggaaaagagtaaactagaaaatacttttgggaaaaagatattaaatatgaattaatttataaactgaatttactattataatttaaagaatataaaaattactttttatattcttaatttttaattacagataaaattttaaaatataagtacttaggagtagatgatgaaaaaaggaagcgatttaagcgttaaaatagaaaagttacaatttccatcgacaggaataggttatgcagaagataagactatatatgttaagaatacttttccaggtcaaacagttacaggtagggtaaaaaggaagaaagaagattatgcggagttaaaattaataagtgtagatgaacgagctgattatgagattgaaactccatgttctcattttggagtttgtggaggatgttcatcacaaagtataccatatgaaaagcaattagaatttttaagtgaagaagttaaagaattatttagagaagcaaatgttgatacaggagagtatctgggaattcaaggaagccctaaccaatgggaatatagaaataagatggaatttacatttggtgatgaagccaagggagagccactttcattaggtatgcacatgagaggaaaatcttttggaatattaactgtagatgaatgtaaacttgttgatgaggattacagaaaaattattagattgactgctgattactttagagagaaagatttgccttactatagaataatgaaagctgaaggctatttaaggcatttagtgataagaaaagctcaaaatactggcgagatattagttaatttagttactactactcagatagactttgatttaagtgaatatgttaaattgctaagagaacaaagttataaaggaaatttagtatctataatccatactgaaaataactcgaaatcagatgcagtaataccagaaaaggtaaatgtgttatttggaaaagattatattagagaaacgctactagggttacaatttaatatttctccattttcattctttcaaaccaatacaaaaggtgcagaaagtctatattctattgttaaagagtttatgggagatagtgaagaaaaaattgtatttgatctctattgtggtacaggaacaatagggcaaatagtagctccaaatgcaaagaaagtaataggaatagaacttattgaagaagcagttgaagctgcaagagaaaatgctaaattaaatggattaaataattgtgaatttatagctggtgatgtagcagaaataataaaaacggtaaaggttaagccagatataataatattagatccaccaagaactggggtacatcctaaggctttggattatgtaattaaatttaatgcaccagaaataatatatgtttcatgtaatccaaagacattagttaatgaccttagagtgcttacggaaaaaggatataaagttattaaaactaaagttaaggatatgttccctaatacacctcacgttgaaactatagtcaaattaatcaagcaataaagccattttagagaatataatcagttgaaaatcttccgacttccgacattcttccgaccgtggatttatgtagtcggaagatttatttttatcatattttcaaaaatattgacactgtcatttgacatctttttcgtagcgtgagagtaaacatccatagtaattgaagatttgctatgaccaagtctttcttgaatatcttttatattggcacctgcttctaataacatggttgcatgagtgtgtcttaaagagtggaatttaaattgtatatttaattcataatttacaaccctacttaaatatttaatgctatctatagttaggagctcaccattttcttttaagcaaacaaaatcatagtcatgtttaatataatattctccatagcgtaatctgtttgatctttgatcattgtgaaatctttttaatagagaaactaatgtatctccaatttttatggttctataactactttgtgttttaggagtaccaaaaacccattgcttaaactcatttctatacaatattttctcaatcttaatagtatgagcttcaagatcaatacaatcccaagttaatgacataacttctccaactctcattccagtatgaaatcctatttgaagagggacatgcatattgctaccatatggaaatctttttaatatattattgtattgttccatggttattatttttaaatcttcaagattatttattaatttttgattgtactttggaatttttacaaatgccattggattttcttttattaattgatatgggtatacagcatttttaaaagctccacttaaaactccatatagattgcttaaatagtttttactaaatccatttctatactttatattaattagttcttgcaatttagcaggagtaattttttttagatgatatatacctatttgaggtttgatatgatttttaattaattgtttataactaacttgagtattaggcttacaattaagcataacgtattctttaaaccaatagtcaaagtagtcactaacgctaatattactttcatctatataactacctgcattttcgaattcaataattgcttttcttaaagcctctagcgcttctttctttgtagaaccgcccgcacgttcaattttttttctttttccattctctcttcctacttcgaaactataataccacttgttacctttttttctaacgcttccttccatgttttaacacctccacgttagctattgtttcgcaatttgcattatttatacttgataattcttcatcatttttatgtatgaaattctcattttcgtctatatcccttttataaacgatttcattattgagtcttatcttcaaaatgtatttccatagcattaaaatctccccctagcataaagcgaactgctgttctgagtaaaattataacatttatggattttaatttaaatattttggaataaatttttggatttttaggagaaatataaatatttaataaattaaagtcaaaattataataaaggacaaataaaaaaccatagataagttctacagttcttctttataattttaattatttctttttggagttttcaattaatttgtttacatctaatcctacagcatctaattgtttaataatattttgaacctcttcagcagttagttcatgaggaaatcctttatcgatttcaatttctatagtttgattatgcaatgttccggaatatattttggcaagtttatcatcggttctacctaaaagataatcaatgctacagtcaaagtaatcagctattttaattaacacatcatccttaggaaatctatttcctttctcccaattagttactgttgcaggttcaacgctcatgattttagcaaagtctttacctaataatcctttttcttcacgaagctctttaagcctagtgggaaatttactcatattatcaccaccttatacacaatttattaacttatattataaactatttgctaattaataaacatcaaattaactaaaagaaaaaataaaatttattaaattaagtaaaatatgttgaaattatctaagtgctaatttataataaagctaaattagcaaaatgataaatttgcaattttgattatcattttgaaaattaaaatagtaattaattaatagtgaataactaaaaaggagaatgagagatgtatagcaaattaaaaggccttatggtagaaaaaagaattactcaacagaagttagcagaagtgcttaaaataactggaagtgctctgaattataaaataaacggaaagtctgattttagtgtaacagaggctaaattagtttcaagtttttttggaaaaacaattgaagaaatatttgttattgatgaagtcaataacaggaaaactgatagaagtgcttaaaaatttagaaaaaacttttataaggggaaatctgcgaattagagtgggggagagtagaatggagccagtcttatacactgtatctgaagcagcagagttattaaaaattaataggaattctgtatatgatttattaaagaagaatgtaataagaggtctaaagcttggaagtttaaaaataaccagagcagaattaatgaaatttttagaagagagtaatggaaaagatttatcaaatttagaggatattaaagaactgacttttgataaataataatagctacttaaacatgtataataaattcatttttatgcatataggtggtggttttagaaagaaggaatttaagattagaaaattcgaaggactagcagctaatgatttaatagaaatattaaagaattatccaagggatacaaaagtattcacacaaatgttaggagaaggcttccaaattaaacaagttgaagagtgcgtctatttatgcttggaaaaatggtaaaacggttcaggaggagcataagggcattttaattaagttaaatcttgatggcgtgttcctcatcgaaatcttagctgaatttatacccacagtgtaaccacaagggtcacaatgtctgtggtcatgctgctgttatctttcatttaaaaaagcattggtgttacagaggatagacattagataaagtcataggaaattataaatgagggagaagagtgaattttaaaattttaaaatgctatatatatgtttgtaattcaattggattgattccatcatggcagggacttgaaaggtttagattattttatgtattggagaataatttagataacttaaaatttcatgacatcacttttcacgtgtaaatttagttgatttacatagactaattaaaaatatgatggagagtgattaagttgaaaaaactaatattaatcttggtttgtgtattatatttaattatctatcaagaaaagtcatttgcattggaaagagaacaatattgtaaaaaagaagtacttaagttagaagtagattcaaaagaaaaaatatatgaggatgtaattatttgcttatttaattccgacatacaaaaagaagtgaataattactataaagaatacctaactgaaatgccaactgtttttccagatagcgttgatattgttaatattaaaagaataagtggatacagaatccaatcagaacttataattcatccttttgtcggaccttacaattacgttggagatgacagaataataattgaaactggagtggatggatatcttaaagtcattaagtttgaacatcttaaaagctataaattgccatggaattggcaacacatagtaaaaaaggcatattaaaataattaaattatagactacattgtttatatgtagtctatgtataaaataagtaaaatcaagcagtgtacaagtgagtacactagatatttatgggagcgtgaagataatggcagatattaaatggattaaattagctacttgtatgcctgatgatgaaaaaatgaaattaatagatgaaatgaaagaaagggatacaatccattatgtgtggataagaatacttttactaggtggaaagcttaatgctaatggtgaaatattcctatcagagggaacgccacttactagcaaaatgctagccatattattttcacgaccattagaagccattaaacttgcattaagagttctatctaaatttggaatgattgaaatagctcctgataaaataattagaattgtaaactgggataaatatcaaaatattgagggaatggaaaaagttcgtgagcaaaatagaaaaagagctgagactcatagagaaaagaaaaaatgggagaagaaggttggtaaaagtgaggttcaagaaagttatgaaagtgaagttttagaagaaagcataactttgaatgaaaatgagaaattagaaaaaactaataatttagaacaaaagaaaaattcatcagaggagaattatgcgccagaagaaaataaagctcttgataaaaatgcaccattagagaatttagaaactagtgaagtagacaataataatagtgcagaaattactgataataatgaagatatcagcaatagcattatagaaactgatgataataactatactgttactaaaaatactagtaacgttacacaaaataaaagtaacgttacggtaacgcaacagaataagaaagagatagagaataagaataagaatgagaaaaaagatatagataaagatttaagcatagagagtgataaaaataatatttgtgatttaaataataagacctcagcttgtgacgaagaagtggggcagtatagtttctttgagcaacatatcaagactaaaagtgaatcgagaaaagaggaggatataaatcttaaagctttagagctcatgcattatcatgaaaaaataacaggaaaaccaggaggatgcgactatgttgcacttagatcagctattgatattcatggagaaaaaatggttaagatggctatggatgttggctttgaaaagaactgtcctgacataaaatatgcaattggagttctaaaaaactggaggagagatgggtatccagaaaatcgtgtggaggtaaagaaaaatggggttagaagcaatgaaaagagtaacacagcagataaaaatgaatttgcaggattcaagccaaaagaaccacgaaaacttacagaagctgaacgaaaaaggattgaagcaaacctcatataggtgtgataaatgctcagacacaggatggatacttattaagcaggagcatatgcaacctcttgctgtagcttgtgaatgtaggaaaatagaaaagctaaaaggtgagtggaagtattcaggaatcaatgttgaacaaagtaaacttactttttctagttttgaagtttggaatgaagcgtcaagtagaattaaggatactgctgcagcttattgtactgattttgatgagattaaaaacaataggcgaaatagcattttattatgtggccaagttggcagcggtaaaactcactgcagcattgctgttgcattaaactttttaaaacaaaggattaaagtagtgtacatgccttatcgtgatgtaatcacaaagataaagcaaaatatgattgacgaagaatattatactaggaccatttcaaagtatcaattatgtgaggtccttttaattgatgacctctttaaaggaaaggtcaatgaaaccgacgtgaatattatgtttgaaatcattaattataggtatcttaatttcctgcctattatagtcagcagcgaattttctattgatagattattagcatttgatgaaggtgttgcttcaagaatatatgaaatgtcaaaagattatgtagtagaaattgagaatgatatcaggaataactatagacttaggtaaatttaaaatacacaatgcacaataaacaattacagagtgaaaactcgcatgaaaatgaatttttggggaattaaacaaaactaaattatgaagggaagttgtttaaatgaaagcatcaggaatagtaagaaagcttgattcgcttggaaggattgtaataccaaaagaaataagaaaggtactaggaattgatgatggagattccatggaaataattaaggttgacaatgaggtggttgttaggaaatatattaaaggatgcatcttttgtggaagtgataaagatgttattgaatttaacggggcgattgtttgtgatgaatgcagaaaggctttaggtcaatattaaagtggacaagccaaagggtttacctaaccgcctagaatgcgcatattgcaagaggaattataagcatggtggagaatgtcaggggaaaagcacaaacagaaatgaagacggctgcctttattttagaatggatgaaaaaggttgtataaggaatatagatcaaagtataccatttaatctatatagtaatattccaccagttggtatgtggagagatggatggacaatatataatcaagatacaaaaatcagaataaataagatatatgctttaagctggaatgaaagaaaaggtctgctttatgttaaatgtaattttgattattttattaatgagtttagtgaagattataaaaaagaagctaataagccaaatctaaaggttattaaataagttatatgaaaaaattaatattttatattatttattaggtactaaaaagataagaacatattttataagaatagtatatataaaaatggagatttatcctagcaatcaggacaaaactccattttttaaaaagactaagccacctcaaatttagtaacttgtctttgagtaacttgagcaccagatttcttaaccaaatcaccagaattagttttgaaaacattcttagcaattacagtatccataagtgcattaacctcatcttttgtaagagtaggtttaacaccagaaacacttaaagtacttttttcaccagctacagttaaaaaagtcatagataaagaatattccatttaatttacctccaatcttaagtagagaacccgaatctatgattcggtgtgaatcacttactcagcgaacgaatgtgagtcgagtttcctacaatatttttttaagaataagatcctaagcatttgctaaactagaagattcgttgataaagtaatctctagtgttagcttccataacacctttaattgcatctgcaacagcatatacattatcaggtgtagcatctgtttttatacctgagaaagttttcttggtataaattgggtccccagctttatctagagctttttgaacctcgatactaagagaaacagagtcaatagttttagttacagccatagttttaacctcctttattttgttttcataaaggatatatggataaatgcttaacattacataaatagataaaaaatatttgtttttttatgaacaaaagaactaaaacagattaaagatattgaaaggatgaatatgaaaagtgaatatttcatcgaaggacaaattagtatatttgatttacctgctatagaagttataaaacccaagaaaattattattaaagaagaaactaaagaagtggataagttttatgcaatcactagattatattcacaaagttgtagcagaatagttaagacactgagtggcgcattgttagttgaattagacgataaaactttgtattttaatgcaagtggcataaatgagtttagtctacctaaagatgtgggaatcatgcctggagaagaaatacttattgtgaatagtgataagaaaataaatgaaaaacaaaaacaaaagttagaagctcttaagcctaagcaatatataaaaagaaaaggtgatgctaatttaataatacctggagaaaaaactgtagtgataaatcctaagggatggatattagagtataatcaaaagccaagttatcattcaaatgaactcattaatacggaatttaatcttgaaattgatgagatggatgataaaaagaatgaaatagaggttgaaacgaatgatatagaatttaagattgacgatgaggttaatattgaatatcaaggagtaaagaccgttgggaaggtagttaggatatataataatggagaaaccgtgaatgtgaaatgggatggaaaacaaacagctttttattataagaatgtaagtaaggtaaataatcctaaataaatgatttcagctgattaagcttgtataaattaggtaattattaagatagaaagaatttaggaggatttttatggttgatataataaataatttatataatatggttttatttctattatggggatttttatttatttcagtagcagtagttggttatatagtagggataataaaatatgctaaaaaatttatagttcttaatcgagaattagagaaaataaaaattaataatatggtcaataaagaaaatatttaggtaatttagaatgtagcagcataaaagagtgttgttacatttatttttttgtagatgtagataattattttttaaaggtgttagtttagtactaaaattttttatatgttcagaattcttattaatatataaatttatatcattatttaaaaaatagattttagaaattttagaaaataaaaaaacttgacttggagttcactccagatgctaaacttcatattgaaatgagttgataaaatataaaaaagtattgagggaggttcattatggaattgctgaaagagaaaaaattaggttttggatgtatgcgtctgcctttattaaataaagaagaccagacttcttttgattatgaattaattaataagttatttgatacttatttggaaaaaggatttacttattttgatactgcttacacatatcatggttatcattgtgaagaagcattgcgtaaggctttagtagagcgtcacccaagaagttcctttcaattagctacaaaattaccactccgtgactttaaagatagtgaagacatgaagcgcatatttaatgaacagttaaataactgtggtgttgacttctttgattattatctgttacacaatatgggggctaacgtttatgagaaatgctgcaaatatggtgcttttgattttgtaattaaaaagaaagcagaaggtaaaatcaaagttgttggtatgtccttccatgatacaccagaattattagaagagattttatcaaagcatggggatgaattggatttcgtacaacttcaaattaattatgttgactgggaacagccaaatgttcaatcccgtcgttgtttagaaattgccaataaatataataaaccagtaactgttatggaaccttgtaagggtggtactcttataaatataccagaagaagctgaaaaattaatgaaagattataatcctgatttttctactgcaagctgggcatttcgatatgcagccagccaaaaaggagtatttcgtgtgttaagtggaatgaacagcatggaacaggtggaggacaatacttctattatgagagatttcgtacctttaaatgaagaagagaatgacattattgaaaaggtcactaaaatcattaatgataaaactgctgttaaatgtactgcttgtgattattgcacacatggatgcccaaagaaaatagcaattccaaaatattttgcattatataacagcatcatgcgtactactggtagtttttcaagtcaaatggtgtactacaacaatattgctattaataatgggaaagctagtgaatgtattgactgtaagcaatgtgaaaaagcttgcccacaacatttaccaattactactcatttaaaggatgtggtagaaaaatttgagaagaacagcattattcctatcagaaaataattattcaacactttagtatgcctatatgatttacatactatttgtagtgagtacaggagaaaaacaattataaacgaattagcattcatggaaatggagaagttaaataataagagaaatggaagtgtataaaatgaaaattagtgatacagcagaaaaaaatcatgaagcattattcccaaatcataaatcaactttaaaagaaactgatccggaattaattgaggtatttgataactttgcatttgatgaagtgctgcagtatggtgaattagatattaagttaagaatgaaggttattttagcagcaatgattgccatgcagacattaagtgaatataaagtaatgactgaagcagctttaaatgtaggaattactccagtagaaataaaagaaatagtatatcaatccataccatactgtggtattgcaaaagcttttgatttcattcatgcaactaatgaaattcttacaagcaaaggtattaaacttccattagagggtcaatcaactacacatccagataatagaatggaggaaggactaaaaatccaaaaagaaataattggaggagaggttattgataagatgtatgaaaactctccagaaagtcaaattcatattcagaaatatttatctggaaattgttttggtgattattatacaagaaaaggtctggatgttaaaacaagagaattactaacattttcaatgctgattgctatgggaggatgtgaaccgcaagccaaagggcatataatggcaaatcttaatgtaggaaatgacaaacagcttttattaactgttgtaactaatttattgccttatattggctatccaagaacattaagttcaattagttatttaaatgagataattccggaaagtaaatagtaaataacattttcttatcttaataaaaaggtattgacctggagttaattacaagttgtatagtgacattgaagtagaatagaaataaatataattataaaatggaggattttagtatgagttttaatatgtatgtaccaacaagaattttatttggagcaggtgagttaaataatttacatactcaaaagatgccaggtaaaaaggaaatggttgttatttctaatggaaaatcaactaaagaaaatggatatcttgacagagctttagaacaattaaaacttacgggagtagaggctactgtatttgataaagttcaggcaaatccattgaaatctactgttatggaaggtggaaagtttgcaagggaaaataactgtgattttgttgtagcacttggtggaggaagctgtatagatgctgctaaagctatggcaactatggcaacaaatgatggtgattgttgggattatataagtggaggaactggaaaaggaaaagcaatagaaaacaaaccactaccattgattgcaataacaactactgctggaactggttcagaagttgatcaatggggagtaataaccaatgaagaaacaaatgaaaagattggatttggaggacttgatgaactatttcctaaaatcgcaatcattgatccagaacttatgttaactgtaccaccaaagtttacagcgtatcaaggatttgatgcattatttcacagtgtagaatgctatatttctaaatttgctaatttaatgggagatatgtatgcgataactgcaattgaaaacataagtaaaaatcttgcaagagcagttaaagatggtaatgacattgaagcacgtgaaaaagttgcattcgggaatacattatctggagcggttatgacaataagcgtatgtacaagtgagcattcaatggagcatgccatgtctgcataccaccaagagttgccacatggagctggtcttataatgattagtaaagcttatttcacacattttattaataaacatgtatgtgatgaaagatttataaagatggctaaagtaatggggatggaagatgcaaaggatccaatggatttcattacaatgctcgtaaaattacaagaagaatgtggcgtagctgatcttaggatgtctgattatggaatcatatcagatgagtttgatacaatggcgaaaaatgctagagaaacaatgggtggactattcatgtgtgatagaagtgaacttacccatgaagaatgtgtagcaatatatagggcttcttataaataatttattaaaaatagtatggagaggatgatttgttatggataaaaaagaaattagtgtatttcctaggggagaaaaaaatgatgcgtatgcaaagtattttgttggtcagagctacctgaacatgctgtcattagaacaggtggtaattggaaatgtgacttttgagccagggtgtcgcaacaattggcatattcataaggcagtatcaggcggtggacaaattctgttagtaacagctggcagaggctattatcaagaatggggacatgaagcaagagaattgaatcatggagatgtggtaaatatccctgctggtgttaagcattggcatggtgcagcacctgatagttggtttacacatattgcaatagaagtaccagcagaggaaggctctaatgaatggtgcgagccagtagcagatgattattataataagctaaaataataagttaatacatgaataaataagattccctagcaaagtaagtcgtattacgtttaacttaattttgctggtcaatgtgatatttaacaggaaaaatgcaaaaataactgaaagggaatggggaaaatgcaaaattcaaaaagtcttattgcttatttttcacgaaaaggaagtaattatgcgggaggtaagattgtaaacctgccaattggaaacacagaagtagtagcaaataaaatacatgaattaactggatgcgacatgtttgaaataaaaacagtaaaaccttatccggaagattacacggaaacaacaaatgtagcaaagaaagaaattagggaaaataccagacctgaactaacagaaacagtagataatattgattcatatgatgtaatttatttaggataccctaattggtggggcacaatgcctatgacggtatttacgtttctggaatcttatgatttttcaggaaagacaattgttccatattgcacacatgagggcagtgggttgggaagtagtgaacgcgatataaagagactttgtccaaacagcaatgttttatcaggtttggcgattcaaggaagtagctctaacagagcagacaaagatcttgaaaaatggtttaaaaaacttgatttaataccataaagtttttctttaatattattttaaaatgttttactgtcgtattgtcttagtttatctaataggtagatattttatcatgggattgtttggcacataggtagttatgtttattgattggattgttaaggggttaatttttatataccgttacttaagtggaaaatggatgaaaatctatgcaatttaatatataaaagacagaaataattgatttggagtaaattacacgtattatattgttaaaaggcggtgaaatcatatgacgattacagaagtaagcaaaaagtttgatctttcgcaggatacactccgttattatgaacgtataggattaatacctggagtagatcgtaataagagtggaaataggaattatacagaagaagattgtaaatgggtagaatttataaagtgcatgagaggtgcgggacttccaatagaagcattaattgagtatgtaactttatttcagcaaggtgatgaaactattgaaaccagaaaagaactattaagtgaacaacgcagactattggcagaaaaaatggatgaaatgaaaaaaacattggatcgtcttgactataaaatagaaagatatgaaaaagcagttgtttcaaaagaaaatgagttaaggaaattaaatagttaattatgaaatacatatctcttctaaaaattaagagggatatgtatttgtgaaaagtattaataaacacaatatttcaatttaaaaataaaaaaagcatatatgttgagtaaatttaatggtttattaatactataaattattatgaagtgggggtaaaatgatgaaaaaaacattatatctaatgagacatggacaaacattatttaatgtcagaaggaaagttcaaggctggtgtgattcaccacttacagaattagggatcaaacaagcagagactgctgcaaagtatttcaaagaacataatattatttttgattatgcctatagttcaacatccgaaagagcatgtgatactttagaaattataacggatatgccttataaaagattaaaaggcttaaaggaatggaattttggaacttttgaaggtgaaagtgaagacttaaatccatcacttccttatggtaacttttttgctaattatggcggagaagaagaaaaagaatttcaaaaaagagttgctaatacttgtcaagaaataatggacgaagataatgaagttgttttaatagtatctcatggagcagcttgcaagcaatttatgagatattggcaatataaaagttctgtagatcaaaaagaaaggcttggaaattgttgtattttaaaatttgaatatgaaaacagagaatttaaattaattgaaattataaatcataattttgattgttaaagcattagaagaacttatcgcatatttgcagtgaatttgcgatatttttttgttcctaattctaaagtgaagatatagcattaataagaaaaattatccacccaaaattctgttttcatattcaattttgttggatatatattccaaacgggatattacacgatttttgagaaagtcaatggtaatgttaactattgattaaacagtagtgatttgaaataaaattattaaaaaatttatattcaatataaataataagtattgataatttaagataattttatatggaagattaaccaagttaaaattaataacttaatcaacaggaggaataaaaaatgaatattaaagaaaaatatgaaatagctaaaaaagagtatgaaaaatggggaatagatgtagacaaagttttagaagaacttaataaagtaaaaatatcaatccattgctggcaaggggatgatgttacaggttttgaagtaagtcaaaatgaattatcaggaggtattgcagcaactggtaattatccaggaaaagcaagaaatgcagaagaattaagaaaagatttggataaagctttaagcttaattccaggaaaacataaggttaaccttcatgcaatatatgctgaaactgatggagaagtagttgaaagagatgaattaaagccagaacattttaaaaactgggtagaatgggcaaagaaaaatgaattaggtcttgactttaacccaacaatattctctcatccaaaggcatcagatggattaacattatcacatccaaataaacaaataagagatttctggataagacattcaattgccagcaaaaaaattggtgaatattttggtaaagaacttggtcaaacctgcttaactaacatttggattccagatggttataaagacatcccaagtgatagattaggaccaagaagaagacttaaagagtatttagatgaaatattaaaagttgaaatagataaaaagtataatcttgattgtgttgaatcaaaggtatttggattaggtgcagaagcttatatagtagaatcaaacgagttctattaaaactatacagctaagaataacataatgtgattaatggatacaggacactatcatccaacagaagtggtatcagataaactttcagcaatgttactattcaatgaaaaagtagcacttcatgtaagcagaccagtaagatgggattcagaccatgttatagttttagacgatgaacttaaagaattagctaaagaaattgtaagaaatgatgcattagatagagtaattattggacttgatttctttgatgcaagtataaatagaatagcagcatggacaataggaacaagaaacatgataaaagctttattaaatgcaatgttaataccaagcgaaacattaagacaattacaggatgatggaaacttcacagaaagattagctttaatggaagaattcaagacatacccaatgggtgatatttggaactactattgtgaaaagaacaatgttccagtagcagaaagctggcttaaagaagttaaggaatatgaagaagttgaattatcaaaaagaaattaataattaccattaggtggatcagtatttattagagaattatgggaaatggcgacagaatgtccagtagtattcctaagtggaattggagtagtttatttagtactaaaggaaaaatccacgctttaatttgaaacgtggattttttctcattgataattttacatagtatttatgagagtttcgaagtattatacttaatatataacttcaatattgtaagaattaaaaaaatcatctttaactaactcattaagagggcttattttattctcaactataccttcaactacaagggttgcaattttttttgcaccactttcgttaaaatgagtattgtcttgtagtccttctggataatttggtgactcattaggtgaaacccataaaaatatttcttttgttttttccgggcctaatgtattaaataaaattctagttttctcgttcatatctattaagttaacattaagttctatagcgagctctctcatagcaattggataatctccatgagtatctgttatttctttattttcattaaaatttcttctctgtattgatgttaataaaaccggagttgcattagcagtttgagcaacttcaatatacctctttaaataagatttataagtagtgaaagcatctgtatgaagttcaatatctgacttttcatcattatgaccaaattgtataaataaaaagtctcctgaacttattaaatcttttattttttgtaaatgaccttcatcaataaaactttttgaacttctaccatttaatgcgaagtttataaattctacactgtctgaaaataattcaacaattctttcaccccaacctgtctcaggttttttatcaggtaatttagttgcagcagtagaatctccagctataaaaactttaatttttcttttcaatataatcatactccctctagaaatagaatattatcttaaattagattatagatttgtatatacattctcaatactgctattataatcaataacttgtaattttactatcaataatataaaataagatatatatgcatgtacacgtgtgcatgtatagatacctaaaaaaaccttaataaaagacgaggagaataaaaatgagactaggaattagatgtcatgatgtaattcattgcaatttagaagaattagcagaaaaaatacaagaaaaaaattttaaaagtgctcattttgcacttaagaaggttagaacaggatttgatataagcaagatgtatattactccaggtatggcaaaacatattagagacattttttcaaaacgagatataagtattagtatattgggatgttatataaatttagctgatccagatgatgatgaacttaataaatcattaaataaatttaaagaacacataagatttgcaagggattttggatgtagtattgttggtactgagactggagctttaaatagagaatatgtatatagtcctaaaaataatacagaggaagcatttcaaagaacattaaattcagttagaatacttgtagaagaagcagagaagtttggtgtaatagtaggaatagaaggtgttgcaaagcatgtaataaatacaccagaaagaatgaaacgtttattagatagcattgattctaataatctgcaagtaatttttgacccagttaattatatagatgaaaataattataaagaacaagattcaatgatcaaaaaagcttttaatctttttggggatagaatagtagcaattcatgcaaaggattttatttatgaagaaaatgaaatccgattagtaacaattggaagaggacaattaaattataaattattattatcactgattaaagagagaaatccatatattgatatatttcttgagagtacaaaaccggaaggtgtagatgaaagtataagttacataagtgaaatttataaaaatatgtaaattattaacttgatttataatttacatattgtttcaagaaaagcctgtagcttttcttgtttaacttatcccttttaacttttaatttgccgctaatatggattttatttttcaatccatacaaaacataaataataggagaatattttaataagagggctaatggagaaaaattatcagaaagtatgattagaatgtatagcagtgattctaatgataaaatattagacaagcttaaacagctatgtagtaatactaagcatagtataactgatttttgtttccaatatgtgatgatgcaagactttccatctataccgattgcatcttttagtaatgatatacaattagaagcgtgtatgaaatgtgtagatttaaaattggataaagaattaatagattctgtttcaagatataaggaattacaataaaattagaaagtagtaatacaagtaatcttataatataaacaccccaaattgcaaataaagataataaattaaacaaatatagatataaaaaacgattttgatgtgtaatataatttatttataatataaataaattaaaaatgggggtactatacatgttatttggattaagagggaataaacctgatatctttaaatatattgaaaaaatgagtcagggagactttatatgtatagaagaattagcaaatagttaagacttagatggtaaaagggcatatgagtctttaagtaagctgattaatattatgtcaaatataaaaacaaatgtttctgaatttgataggagaacagatattatatcaacttccattagtgaaagatctgattataataaaagtatatcaactgctcttgacgagtttgcaaaaagtactacccagcaagtcatgtctgctgaaaaatgtacagaaagtttaagtgggtttcagaataaatttgaaaatctatcaaaatcatcaaagattttaactaataaagcagattcaattaaatttgtaagcatagaaggacaaaaatcagttcaagaaatcacatcgataaatgaagactttgaaaagcttttaagtataatattgacaaagattaatgatttatctcaagtagcaaaaggaatacataaaataagtgagattatagttgatatttctggacaaacaacactacttgctttaaatgcttctatagaatctgcaagggcaggggaagcaggcagaggatttgctatagttgcacaagaaataggtaaactggctgaacaaagcaagtcctcaagtgtagatatttataaccaagtatccaatataataaatgaaatatcaggaatattagatttatcaaagtctgttaacattagatttaatgatcagtcaaattcaattaataaaacaattggtgtatttaataatataaataattctctacaggatcttattaatcagcaaaaaacagtttctaatgaagttgacgagctatttaattataaagataaattaattgaaatgatttctcatattctagcagttactcaagaatcagctgctacaacgaaagaattggcaggtatatccatggaacagaataatgaggatgatttgatatttagtatggttaatgagttaaaagaatgtgtatcagaacttaatgaaactttgaaaaaggttaatgtaacgcaaaaaagtactgttaaaaaacgttttgctataacgtgtttagagtagcaagaattttataaggaagttgaagatacaggaatgtatgaagtaaacaaatcaaaggcaagcatatttaataagtaaaataagaactgtaaatagatttgtgtaaaaacaaatctatttacagttcttattttgagaatataaatgctaaaagcagattttatatagattctataactttatttctcataaaatgaaacttagcttaagagggagttttctaggtgccccttgagggtaaatctcccactgaaggttagtgaacttatctgatgcctatttcttcaatttcatatagtctggccaaattatattgttatctttgtccctatcaatcttttgtggcatatcagtactcttaaatattgattcatctaattgttttttagagttatttacggatatacttccatcatagaaataattagatgaatttcttacactattatctacaacatctttattagctgctttatttttttggaaggatagatcattatctaatttaaaatttaaaacagcattagtgtaataatctaagacataatttgtatgattatcagctgctatagaattttctactatcattgatggattactgttacttgtaattcctgatgctaaattatcaaaagataatgaattaactaatgtatgtttaacaggaataccttcaccacctaatttaaatccatttccatcaccatttgtcactgttccatctgttaattttccatttccataagatatggaatcttcaattcttacagctcctatttttcctatttctaatttagagaataaatcccatccatcatcacaattattgtgagatatacatcctttaaataaatttccttctccaactgctattttagctgcaaatccatctgcattattcattgctgcatctttattatcgtatgaagtacagtttagaattgtattatagcttggccatatttctttaggatcgtcattagatagagcacctatttgtaaacctgagtctccatttttataagtttgaacgtcctctataagattatgatttccagctattctaaatccagctgcagtatctttagtctttgttacatcaatgccttttatattccagtaatctccacttagcacaaatccatctgataccaaaccgaaatccaatattgcccgtccatcataagcttctaatttctttaagtttttatcttctccatcatttgaactttcaattactaatggttttgtaagattataagtgccgccttttacttttatagactgattagcaccaacatattgtactgctgtatagatatctactgaattatcttttgttccatttccattagctgttccatcggctgatacataaatattcccactttcatctccataatgtttaacgttaacattaaaggatttatttataggtgttttatctttattatttttagtaatatctggggtataaactacatcaaatttattatcaccatcatttaatttagatggtatagataaaacatcttctgaatttacttttcctgaatagatatctttatcatttagtttaacgttaatatttccactaatagtagcttttaatttaaaatcatatttattatttccagttgcttcactagattgtacattaagttctggttttataatttcatctggagctttctgtccagctggatcttttgaagcatcagaagtagttaaattaatatttgatacagtaattgatgcaacacgagcagtaaagaagccaacatatactttattatcaatggtttctaataattttggttcataatatgttacttcttgtccatcatttacagatgctatataaccagtattagtttttttaagagttaatttatatgttgcagtaccatcatttactggacgatccgcaaatttatgctcacccttcattgatattttactatctaaattagctgttactcctgttctgtaaactgattgaacttttcccctgtaaccaccaactataaccgcattagatgggaatactgatccatcattaaaagttccatttacatctcttgccataattccaaaacctgattgattatctgggctttctttttcaaaataattaacttttactgtagctgaaatttcaaaattttgtgatggatctatttcagtgtagcaatatgaaattccgtcatttgcacctgtaacttttccacctgcattttttccatcttttgttcctgatgttaatgttacacttttattattttcatcaaaacttatagtattatttttttctgaagttgttgctccaaatcttgtaaagttccattttagattttcattttgactgtaattaactacacttaaagaattactatttgtagtagctgcttgtactgaagtaataaatgctccttgtgataaaacaattgttgtagcaattaaaactgataaaattcttcttttcatttttgattctccttctttaatattgtaataaacaacccttgagaaatgatggttaacgttaacaattcatgtaaaggttatctgtaaactttacatgaatatattaccataatgttataacttatacaatattaattataaattccatataaaaatcaaaaaatgttctctttacatatctccaaaaattattttttatttacctttctatacttaagtggcgacatagaggttgtagacttaaaaacacgttcaaagtgagttatattttcatatccaactttatatgctatttcagttatatttgtatctgaatttttaagcattttttgtgcttctcttattctaactatgtttatatagggcacaatattaaacccagtaactttcttaaaggatctgctaagatgagattcactcataaaaaatagttcacttaatttatgcagggatattttatcagcataatttatatttaagtatttaactactttaaaagtattttcgtctttatgctcattttcatgatggttaatattttcagttgagcacctgtatattatgattagtaactgtagcaaaagtgtttttatatataattcagaattagggaagttgttcttttgttcttttagaattttaaaaagtaattcttctattaaagcattttcctcaatattcaatgaaattacgccagaatttaaggtgagcagtttatataaatcttttttagatgctggagttaacatggtatcaaaaaattcttttttaaaattaattaaaattctttcataaaaaagtttacctttctcagcatctaatgtcttgtgaaggtcattcatatttataaacactaaattacctttgttaacattatatgtcctgtctttaataaaataatttctttcaccatgaagaagatagtatatttcataagcatcatgataatgcctatagctcatattatataaaccttttacctttaatttttcaataaaaaaaagagaattaatttcatcatataaatttaaatccataatattcacctacattatttatcttttacgatatataaataatatcataagttggacaaaatatgttgacttttattaatatgaacaaaatatgtgatgaaaataaaacaaaaattgtttagtattaatgggtaataagtacaaaattaagtgcaaaggtcttaatacttattagaggggattaagaaaatttatgaaggagggtgttattaatatgaaatttgtagatagaaatgtaaaggatttaaacatagcctatataggaggtggttcaagaggatgggcatggggattaatgagtgatttagcctcagaagagcagctatcaggaacagttaaattatatgatatagatttacaggcagcaaaaaataatgaaataatcggaaactccatttcaaatatagaaaatataaaaggcttttggaagtatcaggctgttaattcattaaaggaagcacttactggagttgattttgttataatttctatacttccaggaacttttaatgaaatgagatcagatgtacacttaccagaaaagtatggaatttatcaatctgttggagatacaacgggaccaggaggagtaataagaggtcttagaactgttccaatgtatattgagatagctcaaaatataaagaaatattcaccagatgcatgggttataaattacactaatccaatggcattgtgtataaaaactctatataaggtatttccagatataaaagcctttggttgttgtcatgaagtatttggaacacaaaatcttcttgcaaatatggtacatgatatggaaggaattgaaacaccagaaagagatgaaataaaaataaatgttttaggaattaatcatttcacatggatagataaggcttcatatagaggcgaagatttaatgcctttatatagaaaatttgtagataaatattataatgatggttttgaagataaggatacaggacactggatgaataattcttttgctagtgccaatagagtaaaatttgacttattcaaaagatatggagtcattgcagctgctggtgatagacaccttgctgaatttgtgcctaatacttggtatcttaaagatccagatacagttaagtcttggaagttcggtcttactacagtagactggagatttaaagatttggaaaatagattaaataaaagtaaatcttatgtaagtggtgaagaaaaatttgtaataaagaaaactggggaagaaggagtacatcaaataaaagcacttttaggattaggtgatattgttaccaatattaacagacctaataatggacaagttagtggagttcatttaggggcaatagtagaaactaatgcgttattaagaaaagatagtatctctactataaatgcaggaaatttaccagcagatgttaatgctcttgttttaagaaatcttataaatacagaaatagtagttgaagccgcacttactaaaaacttaaagcttgcatataatgcttttgtaaatgatcctttagcaacaataggattaaaagaatcaaaggcgctattcgatgaaatgatttataatacaaaagaatatttaaatatgtatgaattttaatatttatcgaatagtatatattttaatgtagaagataaagctagttatgagataatatctatacaagctgctgaaaaatgactttagattattttttaacagcttgtcttttttaaattttataaatttttataagtatcttctatatattctatacttgaatctaaattttctggaaaagtatcttctttctctttatttaatttatatatttgtagattatggttgctttataagatataagaataaggtattgagattattcatacatcttgtaattttacaggaattactatagaataatattataattatggacacgtgtgtaaaaaagaaatttatatattacttagtaaaaactataagtattaaaatttggacttaattatattaatatggtatttatattctatttaaaagtatagttaatatatttggaggagagatatggcaactacgattaaagatatagcaaaagcacttggtatatcacattcaactgtttctagagtcttaacaggttctaagagtgtaagtgaaaaaactaaagaagcagtacttagagcggtaaaagagttaaattatattcctaatatgagtgctagaagcttaaagatagataaagcttataatattggtgtgtttttttcaactataaacaacggaacttcaccctatgtatttcaaactgtaataaatagtgtatatagaaatatagatagaagatataatgttatagttaaaggtatagatatgtatgaaaaaaatactataaatcctaaaaattatgatggtatattagttgtaagtcagatggaaaatgatgatgattttatcaaagaaattttagaaaaggaaataccaatagttgttattaatagaaaagtaaatcatgatgttataaatgtatatacagatgaaagtataggaacctataaaggtgtagaagaattgataaaaagaggtcataagaaaatagcagtaattgaaggtgcaaagagctttgattctactaaaatgagaagaaaaggttatgaagaggcttttaaaaattataatattaaattaaataaagatttaatactaaatggagattttagtgttaaaagcggttatgaaaaagctaaagaacttctcgaaaagaaagaacagttttctgcaatatttgcttttaatgatgaaatggcaactggtgccataaaagccataattgaaaaaggcttaaaaattcctgaggatatatctattttggggtttgatggaaatgaaattggaaaatttatcaaccctagtataactacaattaaaaggcctataggagaaatttctagaattgctatagatatgcttctaaaattgttaagtaacgaaacagatataactgctaaaaaaatatatatagaatcagaattagaaattgggaattctattaaagacttaattaatacttaattatcaatgttcaaaaactaataattaagcatcgattattaaacaatgaaattcaaatttacataggagttaagaggtggaagtgaaaagttaaggatgaaatagcggagctatttctaagaaataaataattgagagaaatgttgtgcatttcttacctaaactcttcactcttcacttttaatttttaactcgtacctctcctgtaaattcaagtttattttcaataaaaagctgcaagaataagttattatctactgtggcttttatgtttaagtttattaaataaaatacagaaattacaaaaaaaaactattgcaattatttacattaaggtttatacttatattaagcaatttgtgaacacgtgtgccaaatttatgaggcatattatagaaacaatgaattgactgaatagaaataaatatacaatttcttatttaattataaattgtatatttaaagatactttattcttatataaacaagtatgtgtaaatgtttatatgaaaatttaacatagaaagaattataaaatttttaaaagattaaaaaaattttcaccattttaggaacacgtgtgccaaatttatttaaaggagagataaaagatgaacatggagatcagatactcaaatcatccagaagattcaaaaaggtatgatacagaaacattaagaaaacattatttggttgaaaaagtatttattgaagatgaagtaaaattagtatatagccacaatgatagaattatatttggcggcattacgccagttaaagaaacattaaaacttggagtttctaaagaattaggtacagagtattttcttgaaagaagagagcttggagttattaatgttggtggagaaggaactattactgttgatggaaccgaatacagtataaaatatagagatggtttatatgttggacaaggcgtaaaaaatgtagaatttacatcagttgatccaaaaaatccagctaaattttatattaattcagcaccggcacttaaatcttatcctacagtaaaaattgacttagaaaaagctaacaaaatcaaatgtggtgatgaaattaacatgaataaaagaactatcaatcaatatgttcatccagcagtttgtgaaagctgtcaattagtaatgggactcacaatattagaaccaggaagtggatggaacacaatgccatgtcatacacatgaaagacgtatggaagtatatttatatcttgatgttccagaagatcaagcagtaatacactttatgggacaaggacaagaaacaagacatattgtaatgaaaaatgaacaagcggtaatttcaccaagctggtcaatccattcaggtattggaactcaaaattattcatttatatggggaatgtgtggagaaaatcaaacatttgatgatatggatcatattaaaatagaagatttaagatagaagaaattaattagaaatgaggtataaaacatgtcaaatattttagataagttttcaatggatttctttagactagacggaaaagtagcaatagttactgggggaaatacaggtcttgggcaggcatatgcagtagctttagctaaggcaggagcagacttagtaattccaactcacggtagagaatgggatgaaactagaaaattaatagaaaatgaaggaagacaagttgtttttattcaaggagatttaactaataaagaagacagaaaaaatatagttaagcttacccttcaggtttatggaaaaatcgatatactagtaaataacgcaggtactattagaagagcaccgcttcttgaatataaagaagaagattggaatgcagtaatggacattaatttaaatgcattatatttcttaagccaagaagtagcaaaaataatggttgaacaaggttcgggaaagataattaatatagcatcaatgttatcatttcagggaggaaaatttgtacctccatacactgcaagcaaacatggtgttgcaggcataacaaaagcctttgctaatgaactagcttgtaagaatattcaagtaaatgcaatagcacctggatacataaagactgcaaatacagctccaataagggcagatgaaaagagaaatgctgaaatattaagcagaataccagctgaaagatgggcagagccctttgatttaatgggtgcagtagtatttttagcaagtaaagcatcagattatgttaatggccatgtattagcggtagatggaggatggatggtaagataacaaatattatgatatatttatttaaatttaaaagtcaagtaaaagatagtacgatactaaaaaaaaattattaatataaaccttataattttaaattactgtaaatgaaatgtgtaggaggaatataaatgaaggattatgcaaaatggatggctgattcagtaatagagagaaaaacagatttatctagttattgggcttatgagtttggattaacgttagatggtattgcagaagtatggaagcagactaaggataaaaagtatttcaactatataaaggaaataatggatacattcatagaagaagatggggcaataagaggatatagagtagatgagtataatatagatcatttaaataatggtaaaattattttaacattatatcaagagactaaagatgaaaagtataaaaaagcactggacttattaatgagccaaattagtaagcatccaagaaccaaagaaggtatattttggcataaagaaatatatcctgaacaaatttggttggatggactttacatgggagctactttttatgctaagtatgtaaacgagtttactcataattgtgaagaatttgacgatatagcaaaacaatttattgtggctagaaatcatttaatagataaagaaacaggacttttatatcatgcttatgatgatgcaagagaacaaccttgggctaataaagaaacaggactttcagctcacttttggagtagatcaatgggatggtatgttatggctttggttgatacattagaagtattaccagaggataataaatatagaaaagaaattcttgaaatattcaatgacacaattaatgctttaataaaagttgctgataaagatgcccatgtatggtatcaagtattagattgtggtgatagaaaaggaaactatctagaagcatcaggatcatcaatgatagcgtatgcagtattcaagggtgtcagacttggatatttaccagaagaattaagagattttgctaaaaaatcttataaaggtttaatagatgaatttattctagaaacgccacttggattaattaatttaaataagatttgttttgttgcaggattaggtggaaaggataactgtcatggtaagagagatggatcatttgcttattatataagtgaaccaattgtatgtaatgaaccaaaaggtcttggaccatttatattagcagcagcagaagcaaatatgttataggatgaaattataaaattaaaattttggagggaaaaaaatgaaaagaaaaatcacatttatgaatatgattggttatgcatgtgttaacttcttaggaagtggatcacaagctgttatttcagctttcttaatgtatttctatacaacatcttgtaatattagtgcagtacaagcgggtgttatattttctgtaacaagacttattgatgcagttggtaatccgatagttggatctataagtgataattttggtaaaactgcattaggtaaacgattcggaagaagaaaatcatttactttaattggtattccattagtacttataatcttcccgatgttatggacaacaggtcattcttactcaacttattttatattaaatcttatttgggaaatagtattcacattagtagtagtaacaggtactacattgccagcagaaatggcagaaacagctgcagacaaaacaaagcttgtatctgctaaacaatattgtgggcaattttcaagtgctatagcaacattcttcccagctcaatttatagcccatatgggaaaagataatccaaaagcatatttatatgcagcaattacttatgcagtaatgatgtcaatctctcttatagtattctatgtatttacatttgaaagagatccaaaggatataaaagttgttgaaactaaaggtgtaggcgaatcattaaagaagctatttacagatattccttcaagtatgcaaattaaagcatttagattacattcagtaatgatgttattaataggtatttataaaaatttatgtacaggtgtatttacttacttcgttgtatattgtttagggttaacagcagtagaagctggatatattacaagtctttcaactattatttcattagtagcagttactataagtattgcattatgctataaatttggtggacctaaagcattctctatttcaacagtagtagtaattgttacatgtttaggatatttaggtctaacaaagatgggcggttcatctttaatggtaccactattagtggttcttgcagtagttaactttgcaggtagagcatctttagactatattccagtattccaattaccatttatggctgatattgatgaagctgtaacaatgcaaagaagagaaggtatatttactggagctaatggtttattatcaaaaattgcttcttcagttgaaggattattacttggtgttgttttaggtgcagcaggttttgcaaaaggaaatgctgctcaaccatctactgcaataacttgtatattacttcttacagttgcagctccaatggtattattgttactaactcaaatagctgcaaagagattaaaattaactaaagaaagtcataaacttttagttgatgaagttaatagaattaaagctggcggattaaagaaggatgttacaccagaggctaagagtgcaattgaagctttaacagggtataactatgaaaagtgttttggtaacaataatgttggataccatgaaaaaaagtcaaaaccaatgacagcttaaattaataatctaaaaattactttgaatttaaaatgctgcttaggactagctataaatacttaatacaatttaaggaatctatttagaattaatatagtgtacttaaggagattaagtgaaaagttagtcttaaggtagctttctgctatgtatttagatataaggagagtaaatatatggataatacatttaaatggaatcaagatttatatgaagaaatagaacgaaatgtagaggataatatagcaaaggttaataataaagaagtgtatagtattacgggtgaagaatattcagatttaatcagtgatattgaagaagaatattttacccatccggatggccaatataatggggacaaacataatattaaaactgacgataattatagaaataagtctttaataagaaatactcagacagttagattttatggaaatgcaatacaaaaagcaataaataaagcatcagaaaatggtggggggaaagtaataataccaggaaatagtgattcaaataaccctaatgtgtattatacaggtgctataactcttaagagtaacgtagaacttcatatagaagaaaatgcaattttaaaatttgttaggaataaaactaatgaattttatccattagtttttacaaggtgggaaggaattgaattaatgaatttttcaccttttgtatattcatatcaagctgagaatataagtataacaggcaagggaatcttagatggatgtgctgatgaatttaattggatgccatggaaatttggttactttaatgaagaagatcagcaaatacaaagagagagattatttgaattaggacaaaaatgtgtagacgttagaagcgaaaggatattcaatgataaaatttctacaattaggcctccttttattcaattttataagtctaaaaatatattacttaaagagtttaaaataacaaattctccattttgggggattaatccagtactctgtgaaaatatgaaagtaagcaacttaataatagaaagtaatctgtataataatgatggtgtagatccagaatcatgtaaaaatctaataatagaagattgctatttcttaactggggatgattgcattgcaataaaatccggaagaaataatgacggtagaagagtaaatgttccatgtaaaaatataataataagaaataatatttttaaagatggacatgggggaataacaataggaagtgaaatatcagggggagttaataatattttagctcatgataattattttgatagtaaggaacttgattatccaattagatttaaaacaaacgctgaacgtggtggaagattggaaaatatctatataaagaatagtactgtaaataaatctaaattagcagtaattcatgctgatttcttttatgaagaaggcactcaaggagatcacaaacctgttctaagaaatattactttgtcaaatattaagactgttgaaggtggatatattgatgcaaaaaattctttatatttaaaaggattcgaaaattcaccaattgaaaatatttacttagaagatttggagttaaatggagttaaaggagatgcgatattacaaaatattaaaaacataacgtttaaaaacgtttatattaatggaaaaaaatcagaagattgtactattaatatagaaaatctaataaaaatggagagttgtaatagttagggagaagcattccgttttaattgaatatttgatatcataagatgattggattgctgtagaacagttacaaagtaagataagtatatttaggaagaagtgtagaaaattatatatataaaattaactatgttcaaaaagatttaattgaatcttctcgaaaaggctaccttatttttaatatataataatctaattgaataattaaaatagtacatactataagggaaaagttgttgattgaatataatataaaatatatggtgagcattatctaaaaattatcttctaaggaagaaaaatacaagctatgcaaaggtactactattaaatctataagtgttattcataaagtatatattattagtggtataggtatatagcttgcatttttcaatgattttattgcctgcggcagcaaggaaattatccaagccctaaatggcttggataattaaaatacatttgcttgagctaaagctccaatttactagagtttttacttaattataattatagtatttgtattacattacctgtataatcagttctttattatagataatgctttaagttatttattatttactatttactttgtatatttgttactactataaacctatttactatagtataagataataatataagaaattatctgggcgcttaatccatcacccaaaaaagggacaggtcatacagcatatatctctaagcatataggagttttcaggcaagcttcaacctcctatatactaagagctattatacattagactagtcctttatttgggtacccgatgggcgcagaaggcaagtacacttcgctagaataagtcgttgtcccgaaaatgtccaagctaaaatattaaaggccatgaatttttatggccttttgtgtttataaagattttgaaaaattaaggtttatttcttagtttcagcagggacacttcgggaaacgttatttagctaaatgtacatgccttctttgttgtatcagggtttcttgctgtaaatcatggagaagatgttaatgaggtttttggtgtattgtgttaatgaagataatactgcatgcgcagataaaagtttttattgaaatgtgagaatgggaagaaaaagttaatgtttttcttttcaaagaggatcctttaaatttacttctaaattctaactccagaaagagtcaatatgtaataccaaggagctttgctccaagtattacattgacactttcttcaggtgttaatttaagtgtagtgataggattaaaggctgtgccttaaatcctatgaacaatagaaagcgtatgagaaatttagattagtctaaagattattagggttctgtttgggcttattacatgatttatgtataagtgatgcatgagcataaagaaaagggcgcctggacttgccctcactagggtagaagtaaagttttggagagtgagggcaggtccacaatgtacatgcttaccatctagtccttattagtgaaggcgttatttccgctcaagaaattcaatcactaaaaataataaaaataaatattagagaggaaattatttttagtgatgctatttcttgcacttcaacaacactcataactaataatgacaggtagaaaagcaagtacattgacggcgcccgcatgaaataaaagtattcaaaatagaaattatgttgatgcgtagtctatagattttatgcagtgaatgaaaaatattatatttggaagttagagtataattttagtaggtaaagaatagtaaagaatactatataaataataaaggagatgcaaaaaacatccctccaatacataaattatccattataattaagttgatgagattaaatagaatggagttagatttatgtatgaattaagtttaagtgataatggatttacttttaaggagttagagaaaagaatttataaatatgcttgtgatgaagcttgcaaagcattaaaaatgcatattagaatctttggacgaaaaactacttaatgaaagagatagcaaggtttaccgtaataaaggccgcaagcaaacttgtttgaggaatattatggggaatgtatctataaatcttgtagaaattattttgactaacgttacggagatttcttttagaaagacatctgagaatattaaaactatgtgtaatcaagaaatttgcgctcaaggcgtttggaacatagttcaaatacttggagaaaagattaaagaactagaaaatcgtaaaattgaattaaatgagaaaggtctctaaaaggagaaaaggtagtaccagtattgtttcaagagcaagatggagtttgtctatatatccaaggtaaggatagaccgaaagggaaaaataaaaagaaggaattaaaactagaagtatcatataccggctggactttacgtccaggaaagaaaaatgaatatgtagttgttgataaaactgtttgtgcaagctttagcaattctagccactttaaaaagcttgctagcgaaacaatttcagaaaaatacagtgtagatgaaattcaaactagaatattaaatggtgatggagcaccatggattaaatcaacttgtgaagatcaagatgttcattttcaattagattcatttcatgtgagtcaagcaattatacgtaagataagtgacaaaagagctcaaaagcaattgatgaaatatttacaaaaggtaaaagtgatgaaggtctagaagatattgtaaatatgatgatgcttacaaatgaagaagatagtgcatttaagaagcttactgatctatatgattacttagttcataatagagagggattaataccatacaaattaagaagtaatatagacatacctacggcaccggaagacatagaatacagtaatctaggaacaatggaacataatatttgtgatgtattagctcaaaggatgaagggtagaaaaatagtgcgtgatttatgtgaattaaaatcatttagtgatattagttatagttaagtataaagcatgggtatggaaattctaagaatataatgtaaaacaaatgataataattcaaacaattttaatttattaattgacaaactattgtaatcgttataatatataactgtaatatatggattgtaatagcacttagcttgctacacaaaacctatttacaggtattatttttatatatacttgtaaatgggttttattttttatcaggggggattttagtgataataaataaaatcttaaataataatgttgttataacatccgattccaatgataaagaaattattgtaatgggaaagggaatagcatatggaaaaaaaagtggggaacttattgatgaatcaaaaatcactaaaaaatttattttaagctgcatggaatatcctgatcgtcttgttgatgcatttagcagtattgcagctgaatatactgaattatgtgatgatattgtaaaacatgcagaacaaaagttagctacaaaacttgatgatacattatatatctccttgttagatcatattagtacaagtgttgaaagatatagagaaggcttaatattaaaaaataaattactgtgggaaatgaaacatttttatagagtggaatatgaaattggattatatgcaatttctttaatagaaagcagatgtaatttgaaagtaacagaagatgaagcaggatttattgcattgcatattgtaagtgctgaagtaagcattaatattcaagatgtatatgatataacaggttttatacaaaacattcaaaatatagttaaatactactttaagcgtaattttgatattgaatcattagattattatagatttattactcatcttaaattttttggacatagagtattttccaaaaaagaaaataaggaagagaaagaggacagaattgaaaataatctattagatataataaaagaaaaatatgtggaaccatatttatgtactttaaaggtaaaaaagtttattgaagaaaaatattactattatttagatgaagatgaaattttgtatcttacgatacacattacaaagctcataaatacccaatttaaataaatattaattaatagaaagtggtgatttttagaaagcataaatcatttattgttggatagttacattaagttggctaaaccttcattcttattaaatctataatatgaaatggaggaattaaaatgaattatgaagaaatggctaagaaaattttagaagcaattggaggagaaaagaatgtagcctctgttgttcattgtgcaacaagattaagatttgtccttaattcagaaagcaaagtagatgaggacaaggtaaaaacaattaatggtgtattatctgtagttaaaaaaggcggtcaatatcaacttgtaattggaaatgatgtagataaggtctataaaaaacttacagaaatgactaagctagattcaggaaaaaataatgaatcaaaggataaagaaagcattataaacaaagttttgtcagtaataactggctctatagctccaatgataccattactagctggtgctggaatgggtaaagtactgcttttaatcttagacatgcttggaattataagcaagtcatcacaaacatatgttgttttaaaacttatttttgatactggattttattttatgccagcatttgttggtttttcagcagcaaaaatatttaagtgcaatcaatatttagcagcattcttgtgtcttgcaatgttacatccagattggaactcattagtatctgctggagatgcagtttattttataggggtaccattagcattagttaagtattcttcacaacttgttactgctattttagttgtatggataatgtcatacgttgaaaaatatgtttataagcatgttccaaatatggttaaagtatttatggcacccttgttagttatgcttataactgcaccattaagctttgtcataattggaccagtaggaaattatattgctgaattagttgctgatgttgtattatacgttcaacaacattttggaatcattgcaataccaatattagctgctgtatatccttggttagtatcaattggtatgcataaagcattaagtccaatatctgtaatgcttattgaacaaaatggatttgatccagttactcgtgtaattgcattatgctctaatatgtctcaagcttcagcatcacttgctgtatcaattaaaagtaaaaataaagagttaaaacaaattgcattttcatcaagtgttactgcatttttaggtggaattactgaaccagctatgtatggtgttacacttaagcttaaaaaaccaatgtatgcttgtatgattggtggtgcagtggcaggattatttgcaggctttgtacaacttaaagcttatgtttatgttacaccaggtttattaagcttacctatgtgggtatctgcagacagtaatgatttaattaacgctgttataacattgataatatctacagtagttacatttatagctacattccttattggatttgatgatccagattcagaagttaagttagaatataatgatgaagaattaatagataacaaagaattaataaatattgaagaaagaataaataatagcatgtgcaaagaattatcatcacctataagtggagaaattgtatctttaaaagatgttgatgatgaaactttttcaagtggaattgtgggcagtggaattgcagtaattccaagtgaaggtaaagcatatgctccagaagattgtatagtaaaagcatgcttcaattcaggacatgcaataggacttatagtggatggaatagaagttttaattcatgttggaattgatactgtttctttagaggggaaatatttcaattcactagtatcacaaggtcaaattgtaaagaagggtgaacttttactagaatttgatatggaaaagataaaagaagctggatatgatttaacaactatgataattgtaactaatagcaatgattatatggatgtcttaccaactgataaaaatacagttaataaggacgatactttactaactgtaattgagtaaaggaggagtcaaaatgatatatgctgatttgcatgtacacactaatcatagtgatggtgtatgcgaaattagagatgttctttcaatggcgaaagaaaaaggaataaaggtaatagcaattactgatcatgatacagttgatcagtttgatgaaataaaaagaataggtaatgaattaggtatagaaacaattaaaggtgttgaaatgagctgctatgataatgatgtatataaaaaggttcatgtagtaggcttatggcttgatgaggtaacacctaatgttaagaaattatgtgatgaaacattaagatgtagaaacaactatcataaggaattgattaaagaattaaatgaaaaagactatgatattacttatgaagatgctaaaaaatattcaaaatacagcatagtctttaagatgaatattttccaagccttaaaagaaaaatatccagatgaaatgactaaagagagatatcgtgagctttttgtttctaagacatcaaaggaaactgatgcaaaaatggggtatattcctgtagaagaaggtattaatgcaatacttaaagatggaggaataccgataattgctcatccatgtgaatataacaattatgatgaaattgaaaagtatatttcatatggattaagaggaattgaaataaatcattccaaaatgaaagatatagattatgaaaagacattgaatatggcagttaaatataatcttgctaaaagtggaggaagcgattttcatgatcctaagttaattacttttggaaaatttggattaaatgaatatcagtattttgggctaaaaaattattacgaaatgttaaaaggaatatagtatttaatgaaatttggctatcacacaaaaagtgtgatagcttttttatataggaatatggagcctgaattgttctggatatattataataattcatacaaaaaatattatgtcaggatataacaataatttcgatttgtgttctatcaatttccttttttattccaatcatataaaaggagaaaaggtagtaccagtattgtttcgagagcaagatggagtttggatatatatccaaggtaaggatagaccgaaagggaaaaataaaaagaaggaattaaaactagaagtatcatatatttaaggagcttactgagttatatgattacttagctcataatagagatgaagtaataccgtataaattaagaggcgacatagatatgcctacggcgccgtaaggtatagtatacaggaatctaggtacaaggaaacataatatttgtgatgtattagctcaaaggatgaagggtagaaaaatagtgcgtgatttatgtgaattaaaatcatttagtgatattagttatagttaagtgtaaagcatgggtagggaaattctgaaaaaactatgtaaaataatggatgataaatcaaataaaattattgccaacttttacttgactcaaactatttggaaacggaatagtgtgatttcaacaaaatatgctataattaactaaaagataatagtaatttgatgatttagtcaattatcgcaataatgagtgattgactttgtgtaaaatattacaaatcttaataagattaaagtttttataggagataatcatggcaaagattacaaatatttctcacccagtaatacaatcttatattgaagattttatattggaaaatgagatttctaaaagtaaagcaaaagatcaacatacaatattcgagcagttcataaatgatttaatactttcagtttattcaaatgatcctagtgttacatatcaggatatggagactggaacagcatttggcatagatgggatagcaatttttgtagcagatagagttgtaacaagcattgaagatgttgatacagtaattaatgggcttaaaaaatttgaagtaagttttatttttactcaagcaaaaacttctgacagttttgatcgcacggaaattggagactttttagctgctattaggagattctttaacttttcaaaatgcgagattccagaagtttttaatcaatgggaagtgaccaaatatatctactcaaaaagttctagatttaaaaagtcacctagcctaaacatgaagtatgtcagtctatcttcaaaggaaatagacttaaaagatattcatttatcatctacagtaaggatgggggttacagatctcaatgaaatgagtctttttagtgaagtaaaaaacccagagtgtttaggaataaaagaaataatgatgctacatgaaaaagttacttctggtttagaagtttgtgtgactttatcaaaacaacctgttccttatcctaaagatacccataataaaattaaaaatggatattatgggttaataaaacttgaagagtttgtgaaactattgacagatgacattaatggagataaagtccttagaaaaggtatttttaacgataatataagatattacttaggttcttctgaaaaactcgaagttaattcaagtatgaagaatcaattgctcggtcaatgtcgtcaacttaaggaaataaataaaaaattaataaaaaaacacttgacaataattagaaaaaatgaagcctcgctatagatattaaatttatagtgaggttgattttatgcaaaatattaaattattatcccaaattttaaagagaacaaataaattaattatttctaatgaatttaaagaagcatatagcttaggtaattcattttcaagaaaaagaaaattatctttttctaatgcagtacattttatttgctccgcattacgaaagtctatggctacagaaataagtaatttcatcgaagagaatacatatttagattttcctgatatatcaaaacaagcattttctaaagcaagacaaaatatctctcctgaggcatttaaagaattatgtagattatttgttgattctttttataattcaacaaatgctttaaaaaagtggaatggatttaatgttcttgctgttgatggaacatctttacaagttcctgatacaattgaatgtggtaaatattttggattaagtaaaaatcaaaataaagtgcaaaccgctattgcgtcggcgtcagccttatatgatgtattaaacgatacaataattgatgcatctataactaaatatagaactagtgaaagagaaatggctaaacaacatataaatgcacttaataataagaagttgataactaatagtatcgtaatttttgataggggatatccttcttatgatatgtttgactatttaaacgatagaaatttatttttcttaatgagagtatcatcttcatttaaaataatacaatctatttcttctgaagattgtatttttgaatataagtcaaaaggagaatttaaaaaagtaagagttataaaaataaaactttctgatgataccacagaaatattagtaacgaatatctttgatgaaattattactcataataaatttaaagaattgtattttcttagatggggagttgaatgcaaatataaagaactaaaaagtagtattgaaatagaagaattttctggaaccaagccaattgcaattgaacaagatttttatgcatctatttatatatctatggttgcatcacttataaagaaagatgccgatgctgcgatagcaaatgataatgataataaaaacttaaaatcagaatatcaagcaaatagaaattttatattaagtaaagttttacaaaagataataactattatggtaaaacctatttcaggaaaaagaatattggaaaacatattagaaaaagctaaaaaaatacgctcacaaatacgtcccaaccgcaattgtgagcgaaaaaacaaacacccaaggaaaaagcatcattctcaaaggaaatcttgtatataagttataaaaactaaacatttccaaaaatctacttttaccagtaggtttattaattataccattttttaaggtatatagcatacgcgattcgaaatttgtagtaacttttttattactattctactaagttgacgacattgattgctcggtaaagaggactatttatttgggttgttaaataatggagttacaataattgcagattctgttgcgataaattctgaggagctaacgcttacaaactatcaaattgttaatggttgtcaaaccagtaatgtaatatttgaatgtttagatattatttctggttcaaatgacatttatttacctataagattgatcgctacagaagatgaggacacaaagcattcaattataaaagcaacaaacagtcaaacaccacttaagccagagcagttagtagctttatctgcaattcaaaaagctttggaacaatattactctacaaagtccaaggacaataaatatccattgtattacgagagaagaacagaacaatatagagatgaaaatattcctaaagctaagataattaacataccatttcaaattaaagcaacatccgcattgttctttgatatgccacatgaagtctcaggtcaatatggtaaagttgaaaaacaaactcgagggttaatatttgaggattctcatatagcatttcttaactcttactatgtaagtggtctggcatggtataaggtagagagatttgttcaaaatcaagaggaaggcaagaaatttagacgtgcaaggtggcatataataatgcttttaaaatatttatgttgtcctaatgataaaattaatttggcaatagataaaagatctgaatctaacagtaagcttattgaagctgttcttttagatgataataaaacgagtgaaatactaaagaaagcggttgaaattatagaaaaaagccttagtcagaaaggtaatatagatacaattctttcagataggaaaacttttgaaagaaaagatactacaacaattattttggattacattaaaaacaactatgaataggatggagattttagtattaactatggtcagcttatagtattagtaactccttatttggttatgatataaagttgcaattccaatttgtagagttactcatttaatatctaaaaatttaataataaattagaatatagtattcgtagctaagaatagattcacgatattttctagttgtaatacttgcaattctactattagaagtaaaagatttctaaattaatgggcactcaatggattctataaataatatagtcaaaaccgattatattatgtatgattttaaaataagtattcaagtaaattaatttacaattttattcaataatttttttgcataaaaaagaatccaattaagtagtcaaaattggattctataaatagtaacattaatggagtccataaacaataatataacaaatgtcaattatattatgtacaattttaaaataagtattcaaataatttgatttatagtactaaaattctaagaagatatggttaattgtccttgacctaagattactactctatcagtatttgtaataggttttagaaggaacttttgtgaatgtggatccaatgatatagcttgttgtattttctgaccagaatcaaagacaactataaaacctctgtattcggataaattttgaatgttgtacgaaacattttccataagtcctaggtctcttatgctataaaaaccttctttaaatgattttggttcgtttatttgagctacacaagtaagtgtatttatactaagcgataaaaataaaaaaatagaaaatattaaagttaattttttcattggattagccacctttcaaagttctagtaaatataataaattcttaaatttatcatgcgaaagataaaataatatattcaaaaaatatattacaatttagcaaagattgcgtattgtgtaatgctataaatggaagaaaatatgctttgaagtattttatgaaagtgagacagtgccatttgtaaaaatcataattgaatagtcatagtcaagtggaggtaaaatttgttgagtcactttaggatttaatcttaccagtgcttgtatagtttgatcagaatcaattactatgattattgccttgctgttagaaggcgtaatttttgcagtaagcgaagccccaatcaataggtttgtatctcttgcattgtaagtacctgtagtaaatgttttagcggggtctgcaaatgtagttattgtattcattgtaaatgacaaaagtatagatgtaaaaaatattatgatattttttttcattagttatccacctttcagtattcttataataagtaattaaattaattgcttttttagtatttgtaattcaagagaaaatattcgaagcttaaattgttatgaaaaatggcgaaaaatattaaaattagataagttgtagatttcaagaagtaattaatgaaaatcatgttctttgaaaatcggataatataatatttacctgatatattataagtgatttggtataattaagagaaaatgaagaaatcttggaggtatacatgattgaatgcttaagccatattgcttttactgttagaaatgcagacaaaactgctgaactatttaaaataatattctatgggctaggagtaatttcctagccttatttttacgcataaaaatattttaaaataattaaaaaggcagcagccgaagctgccaccaatccattttgcataattattataatctaaactaattattgaggtcaagaaatataaaataaacaatatatgatataattaatttatagtggtattttatgaagaaataagtattctttaactaaagtaagtatgggggagatatttatgtgtacaagtttcatttatcgagagcaagatacaattattggaatgaattttgataacgatggcatgaaatattctattgatactaaaaattctaattggtttactgtacaagttgatggaggatgtggaaaatatccatcatttggagtggattgctttggtaggttctttaataatcttgtagttaattcaaatggaaaaggtttatacagaaggccaagcaaaaaagttacgcacacaactaaatttatagtagatatacttaaaggagttatttgtactgaaaacttaggagaatatttaaaaagtgttgaagttgtcaatacaccagattcaagttgtcacaatatgatttgcgattccaatggcaatgtttgggtagtagaacctggtcgcggtaccataattaatcaagcaaaatcttcaccattttttgttatgacaaatttttcattatgggattatttacatgaaaatgttgaatgtaattgtgatagatttaaagcggtatcaagtgcatttgaaaaatcagaacaagtgaatgttgaaactgcatttagtatacttaattctgtaagccaaagaaatggggagtggattactacattttccatggtctactcaaagaattttaatacagtatattattgtttaaatggtaattttagtgaaagatttgaatataagtttttatgtgataaaaatgaattataattaattcacaatattcttaaaggtatcggataatatgaatttaattttgccatattactgtcacaaatctcaagtattatataaatataaagtagttaaatattatttatcccttattaaataaatattaaccagtattcagaatggtctagtacactctagtagatcattcttttttatttatacagctagataattcatggaatatggaagtaccaaaaaggaaattttaaacaagctctattaataaaaataatttcaatatataaatatagtgatgaataaaaaagctggattttaagggtatatcaactgagcttatctaaaataatgtttttgggagtgcaattataccaatagaaaataaatattgtaaaggggattgtgagcactcacccctgtacaatatttattttatatggagctttagtatttgccccaaaaacaacagaggggtatttatcaagacctaatttaaaaaaatattaatattactttatttatacaaactatatatgtataatttgcaagcaatataagaagagtgtgaattaatttttagtatcgataatccccatttgctttagtcatttaattttgaaatatcagggtattgggacagtaatctttcgtttgcaatttccatttgctcatgatactccacataagaaacacttaattttttcatcgcaggaatgaacacattataataaccacttgtactattaaactctctaagcattgtttgaattttgaaaactggtgaatttttaaattcctctgactgcttgtatgccaagtattgttctaacacttccttgttttcagacaagaatttatcgggattttcaatagattgttttgtcttctctatcatgtcacgaatattttcagtgctaatatgttttgtgctttcgattaaaaacgattgtaattcttcagggaagtttaaagatggtacattatccagaaatgttatgatttctgcatatgcagattcctgttcagtagtagtaataggctcattcaaaaatcgtgcgaaatgtaagcaaataaatcgaccataatatcctggaaatgcttccaataacttttcggttacagttgcacgctgttcgatagctttcaagtccgcattgatttcggcatagctttgaccacaactaagattatcaagaatagattttttcacctgttccttctgcatatttaattccttttgtactgatatcttttgcaatgtattgtttgtttcatcagcaagcaccgccttaatttcttctgtgttaagtccaagtttacgaagaacagaaattcgctttaaacgttccacatcattctcgctaaaatctctatatccgttatccaatataacgggcaaaaccaatttttgctctgtataatattcaatagcctttttagtcaaatttgcaatcttacttgcttcactaattaacatatttatcacctcaaaagaatcataaactaacacccaaggtgatagtcaataggtattataaaaaatactcttgcgacacaattcatgtataaattatatcattattttctataaaattatatttgtttatatatatccgcataactaagtttaacttgctctctaagttctttattttcttcttctaatttttggatttttctcttcaaacttgcaattatggggtctttattattttcatccatttctctttttacttgagatggagtagggactttggattgttgtaatctaagtccttcaattctttctttaatatcctcattgctatataatgttgctttagtagcaccactttcattagcaacgctattaaaattaatagacttttgagccttaataagactgttaattgccacatctacctttgttgtgttttaattgttctttacggtcataattactcatttgatcacctgttttcttgaatcatttctgttctattataaacttttgcactttctataagagatttagttgagtttataagtatttcgtattttttgaacatcaccttcaaactctccaacgcataaatccctgcaaggattaccactattacaggttaaacaaggtgattgcttagcaaaactacatctacaattagttctttggagacaagttccataaggtgtatcaatagcatttaacttataattagtccaaagcatactaagaacatcagaagttatttctccattatcaagatatttcaaatattttactactggaatgactggtagtcctttatcatctaataacatatatcttcttatgttcttttcaaacttaacttcttatactctcaataacttaaaaccctttcttatttatttcatttacatctactatatcacatcatatagatgatatactaattattttatatctatttagtaattataaaatatataaataataggttattcaatatatataatatactaaataacctattataattatattatatttaagcttgttcccgaattttggtaattagtcctgtagtttatgatatgttaaatggaataaaataaacctgaagaggacctcttcaggcttattttatttcaagttctagttgcattggtcttgtatcaaggtaatgttcatattctattttatagtatatgattaattttcttcttccttcatatggcagtgtatttaccaacgaatcaaattgagcttttgatacaaagcctttttcttttataagccatgttgtaaatgtcattagatccaatcctttcatatagatatttttagaaggggataaagaggcgtatttctctaatcccattcggtctgtagataatttaaaaaatattgatacttttcgtgataatataaattagttcttttagattcttcttttgataagatagaaagccattctttatagtgtccgtaggaattaaaagcttctttagtagtaagccattttgtaaatgtaaaatttctcatatttttctcaaatcctctcttaaccttatactataattattgccaataatgcgaacaaatattcgtagatgtttgtacttatttgtatatttttttatatatttaggtataagaaatttgattgttggctagactattttacagataaggagtggaataataatggaaaatagaaataaaataaaaaaagtaaaactaccaacaaagcaacttcatgtggaatgtgagataaagttatatgaagactttgaagcatattgccataggaatggaaaagatgttagtaaggcgataagaggatatatgaaactatgtataggagaataaaatataattaggtaaagtgccccaaaaggtactttttttatacaaaaatatgtctaaaaagttttaaagtgggcataataaaaatatgggagtagaggaagtaaaaagaaaaggtggccataaaagtggaaaagagaaaatatgaatcaaaaacattaatagcggagtacagatatttaagcgaaaataaagaattcagattttctgaaacagcttatagactaaaagatggctcaataattattgagtatgaaggcgccccattgagtctttatggattaaaattaacatataaaaggaacataggaagaaaaggaatattcagtgttgacagtgatgattatgaattctggaagtcatttaggaaaaggattgatgaaagtagttttgtagactacgaggctgaaagaaatgatattttagaaaaagctagggaagaatataataatcaaataagttcaaaacacgaaaatatattagaaagtttatcatgcgaggagctgccatactaaatacataaggggagaaatcccctataaagtgaaacttttcagttatagttttactataactgattttagttgaacttatctaggctcgtgacgttctagcactcacatataacgatatgtgagtgctagaacgactagagatcagataaataaagtgataactaggacaagcgcttagtgccaggaacctatgattaaagaaaatgatataagctatatttttaaaggtataaccaataaattaaaaacagcatgtccaactaagtagcataatatcacatagatttttcatattaactttatctatttatttaaaaggcaggtcaagaccaaaagcgaagcgtgtcttgagctacattttaaataaatgtatcatgttatatgaaaaaaactataataagaggtataatctagagttttcaatggaggcggtcttggactggcttttctaatacctctacataattaaaagtagataatagctctgaaaatcgtatcattaaaaataatgtccctgtgatacaatttgttatttttagtgattggatttttagagcgagaaaccatataatcaaacattttagtaatgaacttaagcctgtacaagatagacatgccgtcacattactaatactttcttatataattgtgatggcatgtctaagtccccaaaaattcttgtcagcttgtctagccaactaaaccttatctttacatcttcatataccagaaaagataaattataatgaacttaaaaaagaaccataaacaaaagttccagtcagagggatggatcaatattcttatatattttaaagaaagaatttaaatgtatagttacacaattataagttattcatgaaaatctccatcctgaagtgccccaccgggaacccaaacaatggactagtctaatgcgtacagattcttactttgtaaaagactccgagtaatgaggagacttttacaatgttagaagcctgtagctgtatgacctgtacatttttgggtggtggattgcggcacccaaggagctcttaagaaaatgaacttgtcctttagaaaatgcgtatatagatatacaaataatagctataatataaaaatgtagataaaatataaataattataaactagctagtagtatataaagataatttaaatcaagcacgtaaaaataaaattaaaccaatagagtggcgcagccacaaggagcacgaagtgctccaatatatttattccttgctgccgcaggctataacaaataatgagaagttcaagatatatagattttacaaatgcttagaatatactatcgttacatataggttctaaaagtaacgaaatatataaaatatcttgaacttctcttccttaggagcaaagcgacgttattggattacaaaagatggactgaatgaaacgatagctaaacacatcataactataaaaggctttattctgtccatcttaactccttttttacagtaaactcttttaattcttcaaggttgatacttttaagaagagtaagaatcttataaaaaattttcgcttcattttttaagatagctttcttcaaaacaaatgtataacgattagaatttacttcgattttagtaccatcaataaacacattttcaaatagtatttagtttcgcttagttaaataagtaacttatatgcttcgtctttatcatattcaaaataatttttaggaaactttgaggttctttttctagccataaattattaccatcctttagtagtattcttatgtatcatcctaagagatatatgattatttattatagattctaaggttcttaaaaattttagaatttaggaattttagaatatatattctgcagaattttagaacttaagaatataagaatttgcttataaaatgcaggttaagagagttgttatacgaatttaatcataattttaatgttatgtcatagcacaaaacatatatcaataatagcatcgcataatttttattaaacccaaataaattatggattgtgttgtgatatggttaataatgaaattaaaattaatgctgaataaggagaggtttttgataaaaagcaaatagctttactaattagaaatcccatttttaaggataaattgaaactttatttgttctagtaagggatattagataaatgccaggagtgcagcttgaaatgtatttgcgatggaattcatcaaggtggttgataattatctagaaaaaaatactgaggttgtgaatgattttagttttgagtagtagttccacgtcgtatttaatttagaatagtattttattgaacgatttagctcttttgatatattatatgcataaaattcatcctttaggcgaagctcgataatcatatgttcttcaaaatttaaatgtttattcttacgcgattttgtgttatttttttgtagttcatagtgattattttccgtgtttgttttggttttgcgattaagtcataacaaagaataatcactatggattttttattggttcaagttcattttgaaactagtaaaagaaatataacaaaaaataagatcttaatgagaagagttcataactaatcaattagagttagaatcatttttgagtatagattctgatgaagttgatgcattttctgttgaagataaattattttttttagaagcaattgctaacaatgagcgtcctacatccaaaaagaattttccaagtaaattaatttcatcagtagttttattttttgaaagtgaagtagagagtgagtcaattagaactaataaatcttctgaatctatattatccatagatgacattattacaccatcctaacaaaataatattaattaatagatactatgataattagaatgatgatatgagtacagttaaaaatattaagaaaataaaaatgtccaaataaagagatcaaaaatagggcctataaataatgagataatgaaattcattgtattacatgtaattgaaagataaatattaaaatgatttaatccatagaaccaataactacaatcacaaagttgttaactataaagagatttgaacagataacatatttgtaatgtttagaaggaaattcgctctttttgtataattagttgtataaaaggaggtggttatgataaatgaagacttacttgtaagatatacaaaggcttataatgaagcggattctaattatgccatatctgctattgtaacattattagcagaacaaaatgcaaaaaatagaattgcgatagaatatctagaagaaaaaggagttccaataatatcaattcaggaaaaattcaataagtatttcaaagatgaacttgataggattgcaacgcgattactaaaagaataaggattagaactctagaaatagggttctttttaatgtaataaaatagactaaattaaaatgaaaaaagcagtagctaggaataatccaactactgcttactttttaaggcatggaggattatacaattatataaattcttatatcactttgatatattgtggtattgagaaaatgttaacgaaatactttaattaacttattgcaatgaagcatttttttagagatcaaagaatctcatcacaattatattaaaacgacttaatttttatatattcctcataagggagcggaactataatttctcaatcaataacattataatttgtgttttctgtaagacttaaattgttaactaaattcattccaattatttaatgctatgattttcttctaaagataaaatttagtttatatataattaagattaaagtatataaataagaaacattagttataggtaactaactacggctttttttgtttatattcatgataaggtatattaattgtaactccagtttcgtcaaatttataatttgtaccttgaagtgggggtaaattattagccaaattcattcctacaacataaagggattcagctgtttgatttggatcttgtaatacagtaccagacataattccgctattaattaaatctatagcttttggaattccgtcaattccgaaaaccggaatatattttgatttatctcctttattgtaaccatatgattgcaatgcattaatagctcctatggccatagcatcattatttgaaattatcgcttctatattttttccataggttaaaaatagtagtctaatggagtcttctgcacatttctcgtcccaattacaagtcttggatagaatttcttgagtttttattccagatttattaatggttgaaatagaatacaaacttctttcatttgttactgtgatattgtttggaccctttagcatgatatattgtaatgtattatcgccatttctatcaatattgtttttgtttgaattccattcatttgtaatgagatcaccttgtaaaatgcctgattgaacagcatcagtagatataactagtgctttattataagatttaataggagctgtttcaaatggcactgtattaaataagattattggaatatttttttgttttgctttgtagataactgattcgactgtattctgatctaaatctactaagtttattagtaaaagatcataatcattttgaagagccgaatctaaaagagtattttgtatgctctgatttcttttgccatcataaaatgtaaagttgatactattgttgtttttattttgaatttcttctaaccctttacggactaaagaaatataaggatcatcaaaactaaataataatacagctgttttaatttgtttttgtggaacaacttgtgaattagcatgcattttaggataatatagtgacatggtagttactataattataataaaaaataagaatagagttttgaatattttcatttcaaagccacctttcatatttagtatggcattaaaaatgaataacattccttaataccagtcatgaaaaagtaaaagctgtaattagattcattctaattacagctttttataaattgataatatgccaattccgtgagattactaatcttttaggaaatattactatataaccaatgtactacgatttaaagaaagtgtgacaaatataaatacatataaatttaatgtaaaaatgcttcggattttgttaaaatatgttataatgtaattaaggtaattaataaaaaaagtaagttgggtgttcatagtataaggggagtgaagagtagtctttatttcctttattactttttcattaattggcatatattataataacagtagtcaggtagtttttgactactgttattataataaaaaacttaaagggagtataatatttttgctaattcaaatcaaaaagactactatgatattgaaaaattgttaccgtatagattagttaatatattagttaatatattatatattaagaaaaatgttacaaagtaaaagcaagaattaagatgtagcagatgcatcgaaagatttatgatcaaggatacaacaaaggatattgcagtggagttgaagcagggagtgaaaaaggattttataaaaatgtgtcccaattattaacttaggtctagtttaaaaatgagtataacaagtacattgactatattgaaaaagttgaatgttaacattaaatagagtaatcattacttgttattgcatttgattttatgataaaatagatatatgcttgtataccataaaccctaaagcataaatataaaaatgcaatcattaatttggttgcatttcaaattgttatttacttaattgtaatgtaatgataaactataaacgtaagtattttaatatatattaacagcagcaggcaagaaaaattttgcttgttgctatttttttatttctaatatataatcaaatcctttcttgtctaaatataatatttttattatcacacattaacagatttttaacatattagttttgttaaagcctattgattttaataattattacaacacatgttttgtaaagttttattaatttaacccgttctactaaaagataactttttacacttattagtatgttagagcttttctatttgtaaataatactgataaatttaactagcacaatgagttgatttaaatatataaaggattctataagggccccttaaaattgagagggctctttttgtacatattaaacaaatattttttaaacactgctttttgtactaagaaataaatgcaagaagtaataatatcttctgaattaaatattttttgaagaattaatacgatatggaaatattatcgattatattaattaatatattgtagagtaggaaaaatactgcaaaagaggagcgaaaatttatttatatgaattttatttaataaccaatttaacactattacatagtataagattataggatataatcctaatactgtatataatattacggaggataaaaaaatggtttacagaaaatgtagatgtcagacaggaaattctaatggagtgcttggagcaaatgatcgatgcaacggaagaaattatcctgctgcagatgcattggaagatgcttataatcaaggatacaataggggatattgtgatggagttgaagcagggcaagagcaagggtattgcgaaggatatgaacaaggggcagtggaagggtgccaaaatgctaaacaaaaagctttgaattgtataggggatatcgattgctaaaagtatagagagctaataaaaaaattattatttggtaaatttactgaataacaaattaaaaagagatagtatattagatgatattgtaattcttataatactatctctatttctatgaaaatttatattttaaaatttataaaaaattaaagaataaataggagaaaaatcaaattattgattttcccaatattaaaactgactgtagaaaagattaatggtaccaattcttattatattagatatataggaatattaactacagttatactatataaaataacaagaaaatagttattcaaattcataaaaatagggaatatgcataaaagcataatccctttaagctaagtatatatgaaacaaaaatatccaaccactattattatattttatattctcaaaaaaagaacaaaagatagaaaattattaattaattgtcttctgaccatttacctagttataaaagaatatgttttagtaattaaaactagtaaacacgtatgttcattattctactactaagaaatcaaatacattattgagcctatatacacactataactaagatattattgtgacaaaacaattaataaataaattatcagtaaatttatatactataatagtgcatttttgcttgaataattttacagttgaataaaaaaacagattcttaggctatttttaatgactcaaaaatttcttctatcggcgtaccgcttgcggcagctttgtaaatatatattactttggatttttctaaatctttcttagcagctttatatccagtattaaagtgatgagaatcagtacagtaaattttgcaataagtataatttactaacattattattagatatctattaatacttctctcacttcttacttgatatccatctagtcctaagtaagttttgcaatctctaaaaaatggttcaatcgcccaacggtcagtatattgagttaaaatatctaacggtgctaatgatttctctaaggaaataaaagttttcaatgctccatctttttgaaaagcatctttaggataacttaaaacaatagaaacattatttctatcttttaagttgccaacataattgtaaatataatattgcttatctttgacggtgacaaggtcaaagttttcaatatttaataatgtagcaaacttatgaagttttattcctagtctttcatgtccttgcggaaaaataactctattagtttttaaagcaccaatataactataaccagctttttcagaagcattaaaaatatccttacaactataccaactatcagctaacacatagcctttattttcaggcttaggaagtgttgcaattaattttttactcaattcgattttactcatagattctttatcataaatatcaattgaatatgggaacactaatccgtcacacgatagtaaagaaactagtatttgatgaccatatacattcttaccttttaagtgagaattatgaaaagaacatttttcaattggattcttagcctttgacgagggctttgtcttttcagaaatagtgtcatcaataataaaatatattggctgtttggattctcttgatttagcccaaataagttctataatatatgattttaacgctctttctaaaagtttttcgtcccaattactatttgaaagaaatctagtaatactagttcgatgtctcgaaagagcaagctccgctatgtcggaaattttaccgttataaccttttgatatcatagcattcattatattttctaaatgtcttaattgaggtttagttaagtaaaaatcaaaatttaattgcttaaaaaatttgtatattgataattcatttgatataattgttttttgaaacatttatgtatagctccttgctgtcattgttgtgtagtaactcaattataacaaggatttatcataaatgtttttttattttattcagttgtaaaattattcaagcatttttgcactattatagtatataaatatagtatgaatttttgttttgcatttttatttgtaggatgttataatgaaattaaagcaattaataaaaatcacattttgagttcttatttaagaatagagagaataaagagaaatctttattctctctattcttttatatcaaatctcaaactaatacatattatgaaattataggagcttatttactaacattataattaaattactgaagaaaaaaatgggtaacagaagttatagaaggtgtgagaatcctaatgtacttggagctgcagatattaatacaacacttgacgagaataatgcatataatcaagatataataaatgagatttttctgatgtagaagctggaagtgaagaacgatatttacaaggacatcaacgaggtgcagaagaagtgtcaaaacactaaacaaaaagctttagattgtataagaaatattaattgtcgccagaaaatatatttattatttagtaagtttactaagtaccccaaaaagaggtaggaaaaaaatcaggtaagaataataatactatctttttttattaaaaatataaaattgtgaattacacatttgagatgaatctattatataatttaataaatatattaaaatttgaaaaaattatttaaaattgaagaatgtaaatagttactatggtataatataaaaaaaacggttttttggaggagaaatttgtggaaaaatataatggcgatttgaatatgctagaattaagagatattattgatttgaaatttcttcaaaagtttcaagatgattttgcacaaagtatgaatattgcgagtataacagtggataaaaatggaactccagttacaatgccaagtagttatactaatatatgttctaatcttactcaatctacacaacttgggaaaaatcgatgtgcacaatgccatgctagtgctggagaggaagcatttagaactggaaaaccttatatttataaatgtcattcaggacttattgattttgcagcaccaataatagttaaaggaactcttattggcacaattcttggtggtcaaattctctttcataatcctaaagaatctgagtttaaacatactgcaagagagcttggtttagaagaagaagaatattatactgcagctaaagaggtaaagatagtagaggagcaaaagattaagtcagcagcagaagttttattttcggtagctaatacattatcacatgaaggatatcaacggttaaagattacggaattaactggaacacttacagaaagctttgaacaaatatcttctgcaacccaacatcttgctgcatcatcaatggaagttactgaaaatcaaaatttattaaataatgaaatagtaaaggtacgagaactttctaataaaataaatgttattttgggttacataaaagacataactaatcaaacaaaaatgcttggacttaatgcgtctattgaagctgcaagagttggggatttgggaaaagggttttctgttgttgcaaaggaaattaggaatttagcagaaaattctagagaaacatcaaaaaatattgctgagttggtgaaaaaaatacaggaatcagtagaaaaaactatgcaggtatcaaatactacactagatataacggagcaacaatcagctgcaatagaagaaacaaatgctagtgttgaggaagtaacaagttttactatagaattagataaactagctaagtcgcagtaaatcctcaaatatggacagaacagtacgaataatatattatgttccccattttggggatttcttttattctttaagaaattataaagtcagttaaatcttttaacaaatcatatagcagactattcaagtgtgttttgaaagaactaaaagaataaaaaaacaaatctattaaaagattactgcttgtaaataattatgataattaaagttaaaaggtttgtttatagatttagaaattatataaattgtaaatattttaagaaataaaaaagaaacgttaagaaaaaattagctttccacttccaattatcacaaaggtatagtcataatcaatgggtaatagattatatttttgtgattgaggttttaacctaaaagcttgctgcattaactgattagagtcaaatataattattgttgcagtagcattttgagatatattttcaactttaggagacatatttggtgataaattcaaatctcttacagaatatatgccttgagagtattgtttttgttgagctacagcatttgatgtgttaataattaacgatgtagatagtaaaaaggaaattatgcaaatgagttttttcattaatattagccacctttcataattttaaatacgttttaaataacagctaggaaattttagcttgtttaaaagttaatttaacatcgccatatattatgaatttgtagtcaggtttaattggaattaatggatttctggtagaactaggtggtattcttataaattgttctacatttttactagaattaataataaataataaaccatcaacgtagggttcattattttctacaatgtaagtaacattatcagcaagatcaagatctttcattgtataaaaaccttgggaatatatttttgcttgagcaaatgtatttactgtatttatagtaaatgatatgaagaaaaagatggaaaataaaataacagattttttcatatgattatcaacctttcataaattaagtagtattcaaataaggagttaaatttattatatggagtatagaaaaatatattcgttataggaaggaggatacttatgttaaatgagaaagaaattaaacattttaagcttattctgaaaaaagagaattgcagattagaatccaatattaaattctttaaatcaaaaggtactgatcttgatgaagcgtgtctagaagaacagaagaggcaagaaaatgctttgtctgaaaataaagagacaattataaaattagataaaatgctaagagagatatctaattaaacatttgattaattgaataatattgaaagagcatataaaaaccccaattaaggggcagaaaatgaatagaataaagtataagatgactattaatttagatctactaaaagagaaaataatattttgaagattatatttaattatatgaagatgattttaaaataattctaaacatggataaataacttgtaatcttaaaaaagtgaacataagacaaaacatattaaaaaataatatctagctatcagttaaatgggatctaggttaacaatctattttgttattaaagtttaatctgtttaaatcttcctttgcttctgatactaaagttctatcaattcactatttttttaaaaaacttatctaagataaatagtaatcctatataaaaagagggatttagatttcaatgtgtaatactatactttggattatttatacttatgttataaaaaataaggggtggtatacaaatgaagtgcttattaaatgaaaatgtaattctaaaagaatatagattgatttgattattcaaaacattacaatcttagaaatatataaagaaatcttataataagattggtaattcgtctgtaaataaaatataaaaaaacccctatataaggggtaaaaagtgaatggataaaaattataaagtgaatattaacaaaagagagaaacattcaagatgttactttagattatatgacatatatcttcaaaagattcataatattaaatgttgagtttgtaaataattattttgggtccaaagtgtatagttaaacactcattgtggcttggtatatttatgataggaaattctaattatctttccagtttcatcgaatttataatttgttctactagaaggacttagtccagagacaagattcattcctaccgtgtaaattgcatctgcatattcacgaggattttgaataacagttcctgccataactccttgatcgattaattgtaatgcttttggcaagccattaattccaaatgtaggaatatactttgatttgtctcctttgttatatccatacttttgtagtgtttcaagggcaccaattgccatagcatcattatttgagattattgcttcaatcttaccgtcaaattaaaaaaaaacatcctccagattaactctagcgcagttttgcatccaaccacaaggtattgagaaaagttcttgagtttttattccagcatcattaatagtttgaatggaagatttagttctggcaagtgttgcagggtcattaactggtccttgtagtatggcatactgcatcatattatctttatttttatctagaatttctttattagagttccatgtaccaacaataagttcgccttgtaaaacaccagattgctcgtcatccccgcctataataacactagttgaatcttgtagatactgtgaaaatgatggatctggaggtgcaagtattattaatgggattctttcgctaattattctggaaatactattttgtgattgttcaatatcacggctaactggacttactacataaaggccaaatgctttagtactaagtgcctgagtaatattatcattttgaataccttgatttgttttggaatcaaaaaaagtaaattgaactttattttcattttctttttgtatattttctaagttttctttaatacgtgagtaaaattcttcgccagcattatataaaaatactccaacttttactggattttgaggattagtattaggagctgcatatgcattgaattcaatcattggtaataacaagataaaagctataacagctgacaatgttttctttaatatgttcatattaagcctccattaatatccttttaattaaaatacatagtaatagatttactagtatcatgaaatttattcaatattataataatctaaatatgttttatgagaagcttaaaaaggaaatagtaaaattaagctaaatattaatttaatggataaaattagattaaaattcagtataataaattacaacaataaacatttcgtgttataatattagaataatttgttatgtgaggtgatattatgataaagtggaaaaaagattatgaacttggagtgaaacaaattgacgaacagcatgaaaagttatttgagattgcagatagagcatataagttattaactaatgactttattagtgataaatatgataaaattattgaaataattggagaattaaaagaatatacattgttccattttaaatctgaggaagaatatatgttaagtattggacatagaaggtttttatctcataaagtagagcatgaaaactttataaaggatattgataatattgacctttataaaattgactcaaaccaagatcaatctgtaaaagaaatattagaatttgttgtgaattggatagatattcatatattaaatcaagataagcttatagtagaaagttagtatcatacttttttgaagcagtagttattagaaatatagctactgctttttatattagtaggaagttgacagggaaaaattagtataattttatacaaaagaattatattttggagtaagctgatttgataatgtaacaatattattcttatgctcatattatgttataaggtttttgcacctataaagggaggttaaacaatgcttattgaaaagtttgtagtattctccattggacaagaagaatatgcagtaccaatatcccaagttaaagaagttatttattatacaattcctacaaggataccctcaagtatggatagtgtgattggtgttataaatttaagaggtaaaatactacctattttgaatttaagcaaagagattggtattaaaagtaataaggaatttaaagagcaaaaaattattattattgaaaataataatccctttggagtaattgttgatgatgttgaagaagttattaagttacctaaagaaaatattaataggattgacagtatatatgaaggagaagaatatatcattggaattactagagtaaaggatagattaataataataatggatttaaatctattttgggaggaaatatcaggatgagatttacaattaaaaagaaattaattgcagcatttggattaataattttgctggcatcttttttagggatgtattccatatcatcaattaaaagtttaaatgataaatctgacgaaattacaaaagtgtggtttaatggaaatgatttagcgcatacaatgaatacaactatggcggactacagggtacgagagtatagacatgtagcaacgaatgatgaaaatctaatgaatgatactgaaaatgaacttaaaacattaaaagataaatttgagacagccttaaatgattatcaaggaactatgatattagaagaggaaaaagatttagtagcggaaattaaagaagaatatttgaaatattttgaaataagtaataaagttttggccttaagcagggaagggaagaaagtagaagctaatgaattgtcattaagtgaggctaaacaggattttgacaaagtaaatgatacaattacaaagttagtggtactcaatcaagaacaagctaatctagctaatgcacaaaataataagacttatgagcaagcgagatttatgctaataatgattgcaataactataattttattcagtattgtagtagcagcatatattacaattaatattacaaagagcatgaagtttataacagattttataaataaaacggcagatttggacttggcctttgatcaagatggattaaagacgataaataagtacaaagatgaattttttgatatgggtatggcattagcaggaatgagaaaaatatttagagaaaccatagataacattaagaaaaactctataaatgtatcatctaatgctgataatttgtcaagtattataggggaaacttctgaaacaatagaaggtgttgcaaaagctatagatgatatggctcaaggttcaacagatcttgctaaaaatgttgaggatggcgctggaaagttaggattgctagcagatgaaattaatgaggttgtaaagagtactgagttgatgaaaaatcatataaaaatggtctccgatgcaaatttagaaggcatagaatatataagtaaattaaaggaagctgtaaaagcaaataattctgtggcagggaaagtttctgtacaagttaatttattagataagaaatctgaatctattgggaaaatttcagatacgattaagtctatagcatctcaaattaatttactatctttaaatgctgcaattgaagctgcaagagcaggtgaacagggaaaaggctttgctgttgtagctgatgaaataaggaaacttgctgctgaaactgcacattcaacaaaagaaattgattctattgtagcagaggttaaaaaggaaataagtacaactaaattagagatggccaatgaagaatctgcaataaacgaaacgagtatatcatccatcgaaacggaaaaggcgtttaaagctatagatgattcggttaataatataatcaaacaaatagagaatttaattgtcaggattaatagtatagataataataaagatggagttgtagaaaatgtaactgatatatcagcaatatcagaagaatcagcatccacaactgaagagatatctgcttctatacaagagcaatctgctagtatggagcaaatatcagaatcagctaaggatttaaagaaaatttcaattgaacttcaggagctgattgctaaatttagaacctagtaaaagaaaatataggtgtaggcacatttctacacctctctataatataagtttcattcgtttcagattaaatttgtaaatgtatagaatttaaagttttaaataaatgtaaattatctaaaagatcaataaagagatacaaaaatataacttataataccaaaagcaagtgaggtataactataagtagaaagagaatataaatgtatccttatgaaacagtgtaattaagtgggagttcccccccacttaattacacttgttttttattatttttcttttcacggtaatattcaggttctttattgcagtatgggcaaggtgtaataatttcatatccagcaacatctaatgccagattatgaatttgcgatagtgataatcctgtattttctaaactctcccattctttatcataggcataatcatcaagacatagtttatattttccagtgttatgacatttgatatattccatatgcatattgcttttcaaatatttcttggtaaattccactataagaaatatgattattcaataaaaaattgagcagagtaatcattataaattaaactaaaaattagaattcattaagggtaaaatcttagtcattccaatttttgattttatagtccttgttcgtagctttctatcattttctttaccatttccttaccaacactacaattttgtcttaaagaaagattttctttatctgtgtaagagtgcttttgaagtcctatttcgtaacctcagtttttaatctgtttaaatcttcctttgcttctgatactaaagttctatcaattcactatttttttaaactgatctaagatataaatagtaatcctatagaaaaagaggaatttaagtctcaatgtgtaatactatactttggattatttatacttatgttataaaaaataaggggtggtatacaaatgaagtacttattaaatgaaaatggaattctaaaagaatgggaaaactttatatcaattattagtgaaaatgctatagcaagaagcattacattggaatcatggaagaggtgtaatgatttaggattagagcgtgataaaattaaatttaagttcttgagtgataaagatcttaaacaaaaggtacaagaaaattcgtatttaattgaagcttcgaagttgtatatggattctttgtctaccagcttaattaacataccacatatagttgctttagcagataatgaaggatggataattgatttgagaggaacaccagaagaatttggaggaaagcaggcagtcatttgtcttggagcaagttggtcagaagaaaatataggaaataatggagtgggaacagctatctccataggagaaccaatccttgtttatggaagagaacattatgcaactgcttatggtggttgcgcatgtataggtgcacctattatatgtaacggtaacattataggagcgatggatataagtgtaccggttaagtatgccaatttagccagattgcacatacttattgcatgcgtaaattcaattgaatctacaattatgcatactaatagtaatgactctgaattagtttcaattaacatgaatccattgataacaagtgagttaattgcaacaactatccatgatctaaaaaatccattggctgtaattagaggattaggacagttgggaaagttgaattcagataaatctaaagttgataattaccttaataggataattaaacaagttgatgaaatgaatgatatggttattgaactcttaagcatatttaaaccggagaaacttatagcacaaaaagtagcctctacattagaagaaatcttattctcgtttgagcccatttgcgagtcaaaaaaaatcaagttatgtttacataaaaatgaagataattatgtaaatatatctgaaaaacttttaaagagagcaatcgaaaatattatcaataatgcggttcaaataatggatgaaggtggaacaattgaaattttaacagaacaagatggggattttataataatatcaattagagatactgcaggaggtataccagaagaattaagtgaaactttatttgaaccatttacttttagaagaagtggtgggacaggattgggcttgtttatggcatatcatacaattgtaaatgttcataaaggtcagatatggtttgaaacagaattaaagagggggaccacattttttataaaattaccgatagcaaaagactttgaaagttcaagaatagaagaatatagattggtttgatttgttttaattaaataataccatcttataaaaatttataaaatcagagataaaagaataaaatactaattttatgacaacaaatgataaaaaaacgagcaatattaattttaatactactttaatggctaaaactagatcaaacttggattaataattttaataataatgggaatacgtagaggaataggagcattcaaaagttttacaaaaaggaataaacaaatgaatgaaaaatttgataccattttagaagaactagaaagaacaagaagtgaatttgaggtggcttctaaaaaatgtttctttagattatactattaggaagtgaatacatatgaagttaaaaaggccagtattagtaacattcattgcatatttaaatttgctaggtgcattttttataataatatcattttttccaatacaaaaacttattgaacaattcggtattctcattattccgatatcggatttattagattctacaattagaatatcaagtgctctagtaatgttaataatatcatacggatattttagacttaaaaaatggggttatggtttaatgataacttataatttattctttttagtgttatctatgatttttatagcattaaaaattaagaattcgtataatacacaaggaataatacaatcacttgttggactaataattacatttccatctaaacgatactttattaaagaaaatgaagattcgtaatattaataagtcgtgtattattttataatctaaattcaaattgaactatctattaacatataaagaaatttaaaggcaataaacacttcaaaatgtttattgccttttagtcatgccactttatgagaatcatcagtagaaccctctgtatcaatagctactccaagtttagctgatattatggtatttaacttattaattgaattagataagctaacaatttgtttctctaagcgaattagcaaataggcagacaccgccactggaaaaccattgtttactataagattaattaaatctgttacttccataattacatcacctcctacaaaggatatatgaaataaaatatattagttcatgttagagaataaataattatttgaaattaaattactgagtgccaccttcatttacaatatggttatgataataatctatagcaatatcaactatggtacttacacatacattaatatctggatgaatactctttaattcatgtatctttcttatggtagaacttctaagagtgtagcttcttttaatatttggagtttcaccatcaatggcaggggtagcaccattagggagaggagttcttctattatcaaacagttccttagcagagcttaaagttttttttatttctatggagctagttatattattttgaaaattactgttaatagttgaagcagtattagtttgagcattgtttttaggatcttcttgaatagaattattattagatttactatcagagctagtttgaataatgttagtatcagaatcatcaaaagagaaggaagatatgcagtcaccagttataggagtttcgctagtaaatccatatacttcaccttcatcatattcaaaatcatttttaggaacgtttgatgtttttcttctagccataaattatataccctccttagccttatttttatgtatcctcgtaaaggatatatggttatttattagagattctaaaattctaaagaatttaggaatatatattttttagaattttagaataaaagaacttaagaatgatggaatttaagaatataagaatttgcttgtaaaatgcgggtcaggagattaaacatacaaatttaatcatgattttaatgttatgttacagtataaaacatatatcaataatagcagccgctaaattttaaagctgtaaataaattattggagtgtgttgtaaaaatgattaaagatgaaattaaacttaattcagaagaaggagagatttttgataaaaagcagattgctctttctattagaaattcaacttttaatgatgaacttcaatgttctttaattgcggaaggaatacttaataaatgtgaaggatgttctcttaaatatatttgtgatagcattgatcaagtagctcaaaactatattaataagactacagatgttattaataattttaattttgaataagtggatatagattaatatagttatataaaataaaaactcctaggttagccttggagtttttacgctttgatgctttcataataatgcgatatattgtttagtattttctttagaatagtgttcttttttaggatagcagtagagtagcacatatttttaaaataagcatattcttttacagtgtaatttttatagaatacaaaatctataagttcaagctcatcttcatttaaattcttaagggctaattttaaatcttcataatcacacatttcacataatgataattcagtggagatttcttctgaaggaagattactttcaaaattatcatgtaaacttaatgcatcactaccttcagtagatcttctagttttaattcttttgattaaatcactcatattatttttaatggcattagtagcataggcaacaaatctatgctttcttaaattgtacatggaaacagatttaaaaagtgaatggtaacattcttggataatatcatggacattatacccatcaatgaaagttcttttagagatattataaattaaaggcttaaactcataagctaatttttcttttgcttcttcatcattgttcttacatctggtaactaaagtttcaatataattaaaatccatataaacctccatcttcaatataagagttatgaattaaagtaattattttacatatattgtgtctgatgttaaatttatctctacatatagtatatatggctagattacatataacatatataggagtataaaaataattagatttatattgttacttatgtttttgatattgaagttcttggttacagaaaagttccgtattgtagtataactactcttttcatgagtgcataacttatatgaaaagtaaaagaaattagaaattatggaaatgatggtttaaaaaatgagtaattttataatagcagttggtcatactgcaagtggtaatattggatgtggagttgttgataggattgataagagcaatagctataactgtgaagattgttatgaaagagcaaataaagctaatgaaagagcaaaaacaaaagatataaaactttatattgagattcatattaatgcagggggaggaactggtccagaagtattagtatttggaaaatcagaagtatctaatcaatatgctactaaagtatgcaatgaattatcaagtactctgaatttacctgatagaggagtaaagacaagaaatcttattgtattaaatagaacagttatgcctgctattttggttgagtgtttgtttgcggatagtgatgatgcaaataaatataatcatgaagttattgcaagagctattgttaaaggattagttggagtagagtgttattgttgatataatctgtagataattctcatcattgttcattgtacttagcctcattttatctatggatgttaatgtttcaagcatacctttatcactattcaaaaataaagaattaatcttataaactttattataataactctctgttaaagttgcagatacacttttgatatatattacacatagaatagaagtaagtataagagataatagcgggattaataacagcccattaagctttaatctgattttaaaaatctttaatttacttatcatcagtatttcatcccatattgtaatatattttattcgagtattaagaataataagcttttattagaaacaatattagctcattgataatatgtctaatataatttctttatgctttgttaaatgccagaagatagttttatataaaaataaaactatcttctattactatatattaattaacttttacaaaactccacatttggctaaaattattagtatcagatgattgaatggtgattgcggaattatcagtggaagaattgcttacgctaagaagtttgccgctattacgattcatgattttataatagccatttccttgatcaactaactgccattcctgactccaagaattagtatcactccattgaatattggttgcaccattactagttgaattgccgttaatattcattattttaccactatttatatttttgattttgtaatatccgtcaccagtagcaaccaattgccactgttcactattccaattactataagtatattgttctatagtggctccatctgcagttgatccaccagagacatttagcgatttacagctataacgattaactatttggtaaactgaagtggtattaacagcatctgtagtatttttaaaagcatttattgcagtggtaaatttcaatgtatttccagagactacgctagttgagccgagtggatatttatctgggagaacactagaattagcttcaggttcccaataaaaaactccaattcctttgttgttaggaacagattgtactttatctattactgccctaattatattatatgactgtgctggatcactctctaatccaccaacttcagcaatcataacttcttttccgtatcgggaagccatatcatttaagttgtgagataaatcatctatattttcactgtagtcgacaccattccaataaggataatatgacattcctattacatcatatttagcaccagcatttgtaagtccatcaaaaatacttctgtataagctattatcatatccatttgctaaatgaagaataactttagaagaaggacttactgtttttattgcattatatccttgattaattaatttagaccagttgctataattagaggaactaccatcaggccacatcattccagaattagtttcattacctacttgaacccattctggatatacaccaacgtttgccaaggcagacataatattataagtgtggtcatatacgtcttgttgcaattgagagaaagtatcatttttccatgcatctggtttgtcctgataagctggatcagcaaagtgatcactgtaatgaaaatcaattaatattctcattccaagactctttgcacgctgtgccatgtaaactacgccattcttgtctccgtaaccaagataacattttgttccatcatttttagtccactgaaaattagatggtggatttacaaatactcttaatcttatagaattaattcctttatcattaagaatttgaagaggatcttgttgaattcctttatcattttgccatttcacgccactattttctagttgatttaaccaacctacatcagcaccttttgcaaaaacagtagcagcgtagacggtagctggagttccgttagaatttattcctagacttgatgtaatagtcatgcatagaagtaatattagaattatcttaacatttttttaaacataaacttatcctcctaaaagtagttttatttgtttatttgctcagatatacaatatttacttgaaatataagtgatacgatatttaaaataagttaatttgtaaactttaaatattatagtttacaaattattattgtgatactattgtattttaaatgattactacatataaagtataaaattcaggtaatatcaacatactgaacatgtaattgaacatattttttggggaaaattataatttaaaggtacctttaagaaaattatagcaattatctaattatatgtaaatatataaatgtttgaaactatcaaaaacgaataaaatacgatggtgtttaaacaaaaagcacaaaattttatgtttattggtaggtgatatggataagttaaaacatatagaaatagcgagagtgttcaaataggtaattaaaaattgacagattttatgattacaagaaagttataaaataatatgattaatacataaaagcgataaaaatgcaacaagtatgataaaaaatatagagggctatatgaattaaagaagaaatgataagtatactaaaaaacagtaatgtgaatttatacaacattaataagatttgaataagctttgagacatcaagtatatggtctaacccaaaaaatgagacagcaaaaatcttaggtgtttagaataatagaatttattagttataaaaataaaaccaacatttttgttgaaagttttagaaatgggaaagaggagaatagtcatggagttatttaataattagaaatatacctaaaatttgaatgattgattaaaaaatatcaggaagtagtgtcttaaagaaatgttataactaattaattgtttgattatgaatgaatttgttgcaattaatgtgtgcttttgctgactttttgaattagttataattatttataagttggttttaacgattggtagtgaatgattgagcgagtaattattaaatgcgatggatttaattttgtgtttgtttttgttttgttataatcgaaatatacttgacattttataaataagtaattataataaaaatatgaaacaaataagaaaaatattagagattgttatttcatggtgaggggaggagcagagtagcgattgagttaaattatataatcgaagaaaacgttgtagttatagtacttttagattattaaggacaagaattattaaaaaacttaataaagagaacgtatcaatatattaatgaatatttaaaagtagttgtaatgatcgatacaaacttatttgttcatagagaagtgccttgatgaaaacgaatttatatcttgttattattttaaattcaaagaaggaatgttgagaagtattgacttgttatttatactattattaatttcattaagtgatagagatttattaggtaaattttgaaggggagtgtagatatgaaaaacataattgcgtttattgaaaagggtaaacctttttttgaaaaggtttcgagaaatatctatttgggagcaattcgtgacggattcttagcagcgatgcctgtaattttattttctagtatttttatattagtagcagcagttccaaatgcatttaatttttactggcctgataatatatctggatggctttggaagatttatggttatacaatgggggttgttgcactcttagtatctggaacgactgcacgtagtttaactgattctatgaatagaaagatgcctaaaaataatcagattaatgcagtatctacgatgatggcatcgattgtaggattcttattattaagtgttagtcaaattgatggtggattttcaacaagctatatgggaactaaagggctgctagcagcttttgtttcagcttttattactgtgaatgcttataaagtttgtgtgaagaacaatgttacaattaagatgccaaaagaagtacctggaacaatttctcaaacctttaaagatgtaattccatttggtttatctatattaattatggtaattttagattcattaacatttagaatttttgggacaacttttgcagaagctattataagactttttcaaccattgttttcagcagcagatggatatgttggaattgctttaatttggggagctatggcacttttctggtttgttggagtgcatggcccgtctattgtagagcctgctattgcagcaattatctatgcaaatgtagatactaacctacaattatttacttcaggacagcaagcaagcaaagtgttaactgttggattaggtaactttgttggaacaatgggaggaaccggtgcaacatttgttgttccatttatattcttattgtttgcaaaatcaaagcaattaaaagctgttggtaaggcgtctgtagttccagtatgtttcgcagttaatgaacctttactatttgctgcaccaattattttaaatccagtattctttattccttttattttaacaccaatggttaatgtatgtttgtttaagttttttgttgatgtatttaagatgaatagctttatgtatgttctaccatgggcaacaccagcgccaataggattagttttaggcacaggttttggaatttggtcatttgctcttgtagcattgttacttgtggtggattttattatatacttcccatttgttaaggcttatgatgatgaattgctcgaattagaattagcaaatgctaataatgaatctgaaattgaaaaaaataatactgtagctaaagcttcacaagtagttgaagtggaaactaaaaaggagattaaatcttcacctgaaaagtctataaaacctaaaaatgttttagtgctttgcgctggtgcgggcacaagtgcaatgttagcaaatgcattaaaagaaggggcggaggaatataatgttcctattacatcagcagcaggggcttatggatctcattatgaaattatgaaggattttgacttgataattttagcacctcaagtagcttcttattatcaagatatcaaagaagatgctgatagactaaatatcaaattgattgctacaaagggagtagaatatattaacttaactagagactccaagaaggctattgattttgttttagaacaattaaaataaagaaatacaggttttatatgttattttgaatataaatataaaattacagatatgaatatttgttgttatttataaaaaaagataatgaaaaacataactaataatgaaatagtataaaaatcagaaatattaagaaaaatagagattaagaaagacaattgtccacaatgaggaaaaatatgtgatgaattaggttttataatattgtaatttaactttataatataaacaaaaagaaacaataacgatagacacacatattgaagagaggtttgaaggaaatatgctaaaagagcaaagatatgagttcatattagaaaacttgaataagttcggaaccattaaagtatctgacttaactgatcaattaaaaactacagaaatgacaataagaagagacttgaaatatttagaagaacaaaatttgctaattagaattcatggaggtgctaggaataaacaaaatattaggtttgaggaactttcaccaaatgaaaaaagagagataaatgcagaaaagaaaattgaatcagctaaaattgctgctaacctaatacaagacaatgatattatatatattggtccaggaactacaacggaatatatgtgcgattatattaatgtttcatcaataaaggttataacaaattgtttaaatatatttgaaaaattaaaatataatgaaagagttgaactaatacttgttggcggtcggttaagggataaaactaacactttagtgggaagctttgctaattctctattagaaaatataagggttaaatcggcttttataggagctaatggaattttggaaaatcatattatgacatctaatgaagaagaagggcaatgtcaaaaagttataatgaacaattctttaaatcgctatttggtatgcgattcaagcaaaatagaaaaaggagatttttatacattatataagttagaagatctaacagctttagtaacagattcaaacttagataattccctaaaagaaaagtattccaagtattgtaggataataaacaaaattgaggaagaataaatgctatagcagagaatatagaaaatagaatattataattacatttgagaggattgatttttcgatggataaacatgagatggaaatggtaacgcttgaaatagtagcgtattcgggagatgctagaacaaaatatatggaagctttaaatgcagcaaataataaagaatatgataaagcaaaagaattaatattagaaggaaataaattgatagcagaagcacacaaagtgcaaactaaaatgctgcaaatggaagcaagtggagaaaaaattgaagtgggatttttagctgtacacgctcaggatcatttaatgacagtagttttattaagagatattattaataattttattgaattatataaaaaatgtaattaagttagaaataatatttagagaggaatttaaagatgagtagatttgaagaagattttatatttgggggagctacagcagcatttcaagtagaaggagcaacaaaagaagatggaaggggaccatgttgttgggacgttcacttaaatagaccagaaagtaaatttaacggagataaggcaagtgatttttatcataaatatgcagatgatctaaaactatctaatgaatttggaataaatggcataagaatttccatttcatggagccgtataattccagatggagttggaacagttaatgaaaaaggagtagaattctataataatgttattgatgagtgtattaaaaataatgttgaaccatttgtaacattacatcattttgatactcctctatcactttttgaaaaaggagattggcttaacagagaaacaatagacgaatttgtgagatttgctaagatttgttttgaaagctttggagatagagttaatatgtgggctacatttaatgaagcatgggcagttgcacaaaatggatatataataggaaattttccaccaagtataaagtatgatattccaaaagcagtacaatctatgcacaatatgatggtagcacatgcaaaggtggttgaattatacaaaagtatgaatttgaaaggggaaattggaatagttcatacacttgaaggtaaatatccaattacagattcagatgaagataaggaagcagccaacttggattatacattatcaaataagtttatgcttgatgcatgctttaaaggcagatatgcagaagatactttcgaaactattacttcaatactttcacaaaataatggagaacttaaaatttatgatggggatattgaagtacttcaagcagcagctagccatattgatttcttaggtatgaattattattcgagtcatttcttaaaaggatataaaggtgaaagtaatatttatcataatggttctggggaaaagggaacaagtatatttgcacttaaaggaataggtgagcgtgtaaacaatccagaagtagagacaacagattgggattggccaatttatcctcaaggtcttcgtgatatgctagttagaattaaaaatgaatatccaaactataaaaaaatatatgtaacagaaaatggtatgggatataaagatgattttatgaatgaaaaaatagatgatactccacgtattgattacattagaagacatttagatgctattttacaagctaagaatgaaggtgtaatagtaaaaggttactttgtatggtcgttaatggatgtattatcttggagtaatggatataacaaacgttatgggctattctatgtggatttcgataatcaaaatagatatcctaaaaaaagtgcatactggtttaaaaaagtagcagaaattaagcaattaatcgaagcaagtgatatagattattaataattttatttttttataaaataattatatataagaaatatttataattgaatagtgtatacttttttgaaataaaagcgtaggaattaatccctacgcttttataaaagttaaaaatattatttgaatagtaaatacttaatgaaaagtaattttgtaagatacatatagctgagaaactttaaaaagatgaattaaatatgaagaatattagagtattaaaaggtaaatttattaaactattttaaaaggagtctgaaattgataataccataaaaactttaatgctgatcatagaaaatacgttatattattttggtaaatatctgattataatacagtaactagtagagggcgtattatactttaaatatgaattataaacactgtaatttatattactaggaagttaagattaagtagtttaaacctcttggtggattatatgtagtcatattaatattatttttcgataaatgaaaaaaagcgtaaaacataggaaaacgaagtaaaattgaaatagttaaaggaaaaacaattacaaaacaaaagcgaacaattgcaaaaaaaacagaacaatatataatgtaaatatagaacaaaaacaaacaaagtaagaagcgtaaaattatactaaaaaatatcaataaatttttaatatttaagatattgtaaaacaagggaggactaattaatgaaaattttaattggagcagataaagctggaacagatttaaagaaatacgtacaatcttatttgcaagaaaaaggttatgaggttatagacaaaactccagatgaggttgacttcgttgattcagcagatagagtatgcaaaggtattttagcaaaagaaggggatagaggaatccttatagatgaatatggagcaggttctttcatggctgcaaacaaacataaaggaataatatgtgcagaagtttcagatgaacactcagcaatgatgacaataagtcataacaatacatcaataatagctatgggatctggaatagtaggaaataaattagcagaagcaatggtagatgcatatttaaatgaggaatatgctggaggaagacaccaaataagaatagatatgttaaataagatgttataggaggaataaaaaatgaaaatagcagttgcatgtgatcatattgtaacagatagaaaaatacatttagtagaatacttaacagaaaagggacataaggtaatagattgtgggacttatgatcatataagaacacattatgctatatttggaaagaaagctgctgaagaggtagtttctggagaagcagatttgggaatagtactttgtggaacgggtgttggaattactacatcaacagctaaggttgttgggacaagacctgccctagttagagatgtgtcatcagctgtttatgctaagaaacatttaaatgctaatataattggatttggcggaagaattacaggtgttggtttaatggaaaatatagtagatgcttttattgaaacaaaatttgagccaaatgaagaagataagaagttaatagaaaaaattgatgcaatagcaagtagaaaagaagatcaatttggaaatgaacatttctttgacgaattcttagaaaaatgggatagaggagaatatcacgattaatttttaaaggaggatatgagatgaagttattatcaacaagagaaatgcttttaaaggcacaaagagaagggtatgcagtaccagcatttaacatacacaaccttgaaacattacaagtagttgtagaaacagcgatggaaatgagatcgccagtaatcattgcagggacaccttcaacaatagaagagtatgctggaccagattatgtgaaagctatggcggaagtagcagcaaggaagtatgatattccaatagctatacatttagatcattttgaagatgtacaagcaataaagaaagatattgatattggatttagatcatgcatgattgatgcgtcaaaacatgaatttgaagaaaatattgcaattgttaaagaagtagtagagtatgcacataaatttgatgcaactgttgaagctgagcttgggaagctaggtggaagagaagatgatgtagtagttcatgaaaaagatgccatgtatacaaatccagatgatgcagcgaagtttgtagagagaactggagtagattctttggctgttgcaataggaacagcacatggattatacaaaggagaagcaaaacttgactttgaaaggttaaaggaaattagaaataaggtaagtgttccactagtacttcatggagcatctgatgtaccggacgagcttgttaaaaaagctatctcacttggaatatgcaaagtaaatgttgctacagatttaaagattccattttcaagtgctgtaaaagagttttttgaggtacacccagaggaaagtgatccaaggaaatatatgactccaggaaaagaagcgatgaaaaagatagtacagcacaaaattgaggtttgtggaagtgcaaacagatactaaattacagcatatatagaatatgcagcatattagatataaataaaaaaatcttaggaatagatatactaaacctaagaaaaataaaatttaataaataaaaactcaaattaattgtaaattataaaaagtaaaaatacaataaaaaaactcaaatctcattaaataaaataaaaactcaaattttattaaagtgtaataatgtattataaaaatatattattacactttatattagaaataagttattcaaagaaaaattataagaatgaatatgattaacataaaacttaattaggaggtatgtatgaaagctgttatttttgatatggatggagtgattattgatagtcagtcaattcattttgaagtagatatgcaaactctgaaagagttgggatgtagtatttcagtagaggaattagaaaaatatgcaggggctacaaatgaatatgtgtttacagatataaagaaaaattacaatatagacaaatcagttgaagagattattaaatataaagtagaaatggttaagaaaagaataattcaatctgatttggaaccaatggagggcattaaagagatcttaatagagctaaaaaataaaaatattcctgcggccattgcttcatcatctcctaaagatcttataagtgtagttatatcaaaatttaaattagaaaattactttaagtacatagtaagcggagaagatgtcaagaatggaaagccaaatccagaaatttatattaagacagctaagaagctagaaatatctccagaatattgtactgttatagaagattcaagaaatggagtattagcatctaaagctgcaggaatgaattgcataggatttcgaaatattaattcaggtaatcaagatttatctaaagcagatattgttgttaagtcacttttagaaataaagtttttataacaaattatattttatattaatacacttttcgaaaatattttattaaatatcaattataaaagccggctatttaagaaattagaagtgtataaagatagaggcgtaggaattggaaacctacgcttttgtaaaatttgaaatattattttagaagtaaattttacttataaaattaaaggagagtaagattatgatattagttataaatttaaatgcatcactagataaaaaatatgaaatagaagatatagaaaaaggtaaagtgatgagagcaagaagtgtggaaaatacaccaggaggtaaaggactacacgtagctaatgtagcaacaatattaaaagaagattgcattgccactggtttacttggtggaaagagcggagagtttatagagaataagcttaaggagtatggaataaagcaagactttgtaaaaataaatggagaaacaagatcatgtttagctattattacagatgattttacacagactgaaatacttgaaccaggaccagaagtgagtgataaggaattacataaatttttagataaatatatggacttaattaaaaattctaatgtaattgtagcgtctggaagtgtgcctagaaatgtaccaaccagtttttatagaagattaatagaaatgactaatacacaagaaaaaaaattcttattagatactagcggagaactcttaaaagaaggaattaaaggaaaaccatattttattaaaccaaatagagatgaaatagaagcgttaacaggaagaaaaatttcttcaacacaagaggcaatagaagaaataaaaagattccaaagccaaggtatagagttcgttgtaatatcattgggagcagaaggatcaattgctggttatatgggaaagttctataaagtaagtgttcctaatgtaaaagcaattaatccagttgggtcaggagattcttatgttgcaggagtggcagtggctatccaaagaaaatatgaaatagaagatatattaaagttcgcatctgcttgtggaactgctaatgcaatggaaaaagaaagtggttttgtaacagaatatgtagttaatgaattgattaacaagataagggtagaagaactttagtggattatattaaacatttataagtataaaggagagaatattttatgatttattctttagaaaattcaaaaataaaaatgactgccagtacacatggaggagagatgcactccttaacttgtaaaaaagaaggaactgaatatctttggaatggtaatccggaatactggaaatatcattcgcccattttatttcccataataggtaaagttatgaattcaaaatttatggtcgatggacagacatatgaattgccagcacacggattagcaagaacatctgaatttgaaatgatagccatgggaaatgatttcattacttttgaactaaagtactctgaagatttactagaaatatatccttataaattttctttatgtataacatatactcttgaagataatgcagtaaaggtaacatatgatgtaattaatttagatgataaggatatatacttctcaataggcgcacatccagcattcatgtgtccaattgaaaaaaatgaattattagaagattgttatttagaatttagtgaaagtgaaactacttctgtagtgggagtcaataaagatgtttatctttcaagagaaaagagagaatttttaagcagtgagaatatattgccgctttccaaggagttatttaagaatgggcttttaatgtttgaggacttgaaatcaaacaaaataactataaaatccaggaaaaatgataaatctttatcagtagagtttgatggattcccatatttgtgtttgtgggctccagaagctggtgcaccgtttctatgtatagaaccatggttcggccatccagaatatgaagattttaatggtgaatttaaagatagagaaggaacagtttcattaagtattgggaaggcattcaattgtagctataaaattgctattgaataataactaattatgaattcaactgctaatttgataaataaaattgaagatttaaaacctatgaatgttatatttaaataactattcacttaagttttgaagaataaaaagtaaatgtgactttatgaaacatttgaagataaattaaacttcggtattaaagaatgaaaatggttctttattaagaaaaatataggtgtagtgtgataaataaaaaacagtagaaaagatatatattattattcaatcaaagtgccataatttcattcaataatataaattacaatattcagttcagatcctggactgaatattgctcaataaaaattaggatataattaatataggaatagttaaaatttaaaaagattatttagcttaataaagttatccgaaaactaaactgaaaatatatactaagtataaacccacaatatctataaacttgtatattttcgtatacagaaatagtctcagataacttattaatatatcataatatggaaacaatctaaaattacccttaagactaatagcgggtgattttagattgatcaataagattgaaataataatatagaattcagttacataatacttaaactaattatttaaaatagcaatcaattattaaagattaatgtatgcaatattattcgattgtgttatagaaagtattttatagtattgaaaaacacatataggagactaaaaaatgaattacaaagtatatcctataggatggttcatattttgtagtaagaccatcaggaacagagccaaagatgaaagtttatttagcaattgggagcaacagcttagacaatgcagagaaagatattgctaaatttgatgaaaattatttgttttttataaacaaaagaactaaaacagactataggtattgaaaggatgggtatgaaaagtgaaaaatagtgaactatatcataagtaaattataatttacttatgatatagagttgttaaaactaactttagatataaaacaagtatgataatttatgtttttagacatatgtaatataaattgatttcataatgatgaattattacgacttaactataattagagaccatagatgatataaattaaaaaaagaagtaagatacatggtaagaaatatattttaacaaaaaggttaaaagtgctttaaatagttataaggaataacttgtaaattatatacctatgtttaaatttctccatattgatttatcaaccatacctttagataatcaataaatcgtttggttgcagggggaatactagatagatttggtacaacgataccaatggtacgattatattcaggctctaaatctttgacacagatattttgagaatttccttgaagaaatagttctggtagcattccaatcccgagctcatgtgcgaccatagcaataattgcgttatcacctttcactgtatatttgatattaggagttatgccagttttatgaaatacatttagtacgtcatcgtcgaatcctttatgtgctagaataaatgcttccttttgaaattgtgatattggaaatctttcagattttgcaaaaatatgatttactggtaaaatagccagcattctatctttttttaatggaataaaattaaacttataatttgaagaatcagttaaaaagccacaatcaatttttccctgctcaagccattgttcaatctctatatagctaccttcatacagttgaatttcaatttgtggaaaatcacactgaaattttttcataatacttggaagccattgaacagacacacttgtaaacgtaccgattctaattgttcctgtttctaatccattaatggagtctactgtttgacaaagtttttcatatccattcagcaattcttgtaaaggttttattaataacaaaccattagttgttaattctacacctgatttacttcttattagcagctggaatccgtactcactctccaaatcatgtatcatatgactaattccagactgcgtataacccaaatcagctgctgcttttgttatatttccatgttctactgttttaagaaaagccttatatttactaatattcatatgtatttcctcttagattcattaaattttctcatgtataatattataaaacttcaatttactaatgtatataattttactataatttatttgaaataatcattcggaggggaatcatgatcttaataggagctagtgtaaatgctataagtattattgttggaggtttattgggtttctttataaataaaggtttatcagaacgcataaatgaaattcttatgaatggacttggtctaattgtattgtatttgggtgttagtggtactttaaaaggacaacagcttttagttgtagttttttctatcatctttagcgtagttattgtagaagtgattaactgtaataagaaattaaaattatttggaaggcttgttagagataattgcaaagtatttggcaagaatcaaactatggcagaagggtttgtgaattgtacactatttgtttgtgttggagcaatggctattgttggttctcttcaaagcggtataactggcagtaacgaggttctctatgcaaagactgctattgattttattgctgcacttattatgagttctattctaggtattggagtttgttttgcaggaatttcagtttttttatatgaagcatgtataactttatcagcaaaagcaattagtggatatcttactacacctgttattaacgaaataacttgtgttggctctatacttatgattggattagcactaaatatgatgaaaattactaatattaaacttacaaaatatatattagccccctttttatcaattttgttttgcctaatattaaatgaactttagtacataatacttcttaaaagatatgccgattagaatccaaagttattgaacaactgctaattttaagaaaaaataaatattgtgttgatttaattatttagctatgataaaatccacatatatttcatttgtaaatcaaaaaaattaataatttagttttctagggttccgcaatttatagttggcaggtccgagagaaaacgcacaatttattgtgtacacggaaggataaaagcctgggagatattgaataatatttccataggctttttttattttttattattttaaactagagatatagatgattagtaatcatttattatagattaagaaatacaggagggattgaaatgaaaaaatttattattgaagattctttttggaacctatttcctaatgcaaagattgggattgttatttgtaacaacatagataattctataagagataaagagcaatatgcagaaattattttagaagcagaaaaggaggttttaaaatatttgcaggatgcagaatttagtaagaaccaagtaataaaagtgtggagggaagcgctccaaaaattcaaaaccaaaaaaggtgcacggtcttcaattgaggcactactaaagcgagttagcaatggaaaccatataggaactattaatccactagttgatatttataattctatttcgttaagatatgcattaccttgtggtggtgaggacatagacaaatttgttggtgatgtaagattaactactgctgttggaaatgaggaatttattccacttggaacagatgaaaactcacctccatatgaaggcgagatagtctacaaagatgataaaggtgcaatttgcagatgctggaactggcgtgaagcagtgagaacaatgcttacagaagatacaaataatgcatttttgtgtattgaattaactgatgaaagcagagtaatagaatttcagaacgcattaaaagacctatcaaaaaaagtacaggataatttaggtggagcaagtaagatttcaattttagatattaataataaagaactagtaatagagtgatttgaggaggataaggagatgaatagtttcagttataaagatatttatattgaggatggtaaaagggtattggaagtgaacatacttccagaaaaaagttgtaactttgattgtatattttgtcctattggaaggtcgcaagataaggtagatatccagaagtcatttgatgaaatggatagttcattaagagaattggaaagcaggatagaaaatactaaagcagaactaatttttattaactcaaaaggagaagcctttgtaaatgatagaattgttgatattatcgaccttattaaagaaaaaggaatacctgtaagattgctttccaatggatatttactaggtagagatgaatacatagaaatagccaataggtgtgacgaaattattggagagataaaaacaataacagaagaagattttcaaaaagcccaaagaccaattgacggatatacactagaagaatatatttcgaatatggtttcatttaataaacaatacaaagggaattttatatttgaaattactatcatcaagggctataacgatgatgaaaaatcaattcagaagttaaaaaatattattaaggaaatatctccttacaagataattgtttcaagaatggacgatgaaagatttaagaaaaaactcggtattacagatgaaagatttgaggaaatttcaaaaatattgctaaatagttaatatggtaaatagacaagaagtttcataaatatgaagctaaaatatattactgatttgttttatatgaggggatcatatatggttgataaaaaataatagaggctttttatatgatgtgggatagttttccaggtttagttagattaattcataaaaattatacagttttggtagctaactaaattgctcgcaaagcaggatttgacatgggaagtatatgctttaaagttggagcgcatgaatctcataggagctgcaaggcaagtcatgcaatttctacaaaaacagcgcagtatgtaaagtaattagaaggaaaaattagatattggcttcctgtaaaaggttgtgatgatatttatgttcatatgacattaaatactaatgttataaagtaattattaaaaagtattaattcataaaatggcattatatttttaggaaggagtgatattatgtttaggcaaatgcgaagaaaagatagagaacttaaagaagatgaaattactgaaattttaaaaaataatagttatggaactttatcaactataagtgaaaatggttatccctatggtttgccaataagttatgttttttataataattcaatatattttcattgtgctattaagggacataaattagataatatattgaataatgataaagtatctttttgtgtagttggagaaacttgtgttttgcctaatgagtttagcacaaagtatgagagtgttattgtatttggaagagcaagtgaagcttctgatgatgaaaaagatatggttcttttagaagtgttaaataagtattcgccagactttattgaacaaggtaaagaatatattaagaaggctggtgaggcaacaagagtaataaaaatttctatagaacatatatcaggaaaagcaaaaggatagttagtgttagtctataatacatgaatttttagtatccttaaagggagaaacaattaaaatttagagttgttgcatatctataagatgttgcaaaataagtatctatttactcacaatttacctaaggatattattttcataaaaataaaatctagataatttaaagttttatagggttccgcagtgtaaaataaatactggtctggtccaagataaaacgcatagtttatactatgttcacggaaggataaaagcctgggagatattttataatatcccttggtttttttgatttttaaatattgtaaggagtgttagaattatgaaatggttaatgttgattgttgcaggtttattggaaatggggtgggcgataggattaaagtattctgaaggatttacaaaacttataccaagtatatttacaatagtgggaatgatagcaagtttttattttttatcattagcattaaagagtcttccactgggtacagcatacgcaatttggactggaatcggtacagttggtactgtaactttaggaataatactattcaaagagcctattgatataactagattaatttgtattggatttatagtagttggtataataggattaaaggttgtatcaactcattaattagcattttgttaatagaaaatcttactaaagagataagcaactaaagtcagtggattagtttggaagttgagtgaaattttgcgtggaaaagtaagaagtgaagttctttttttgatgaaaaactatggtgtaaaataataaaagacaccaacaaattcaaagtgtttattgcctttttttcatgccactttatgagaatcatcagtagaaccctctgtatcaatggcaactccaagtttagctgatattatggtatttaacttattaattgaactcgataagctaacaatttgtttctctaagcgaattagcaaataggcagacaccgccactggaaaactaagattaattaaatctgttacttccataatcacatcacctcctacaaaggatatatgaaataaaatatattagttcatgttagagaataaataattatttgaaattaaaataaactaaattattgagtgccatcttcatttacaatatggttatgataataatttatagcaatatcaactatggtactgacacatacattgatatctggatgtatgctttttaattcatttatttttcttatagtagaacttctaagggtgtagcttcttttaatatttggagtctcaccatcaatggcaggagcagcaccattaggtagtggagttcttctattatcaaacagttctttagtagagcttaaagtattttttatttctatggagttagttatattatttttaaaattgttgcttctagtcgaagcagtattaacttgagtattgttttttggatcttcttgaatagaagtattattagatttagtatcagagctattttgaataatattaatatcagaatcatcatcaaaagagaatgaagatatgcagtcaccagctgtaggagcttcgatagtaaatccatatacttcaccttcatcatattcaaaatcatttttaggtatcttcgcagctttttttctagccataaattatataacctccctttttgtttttttatcagtatttttatgtattctcttaaaggatatatggctgtttattggagattctaaagttctaaagaatttgagaatataaattttttagaattaaagaattaaggaattttagaatgtaagattttaagaatatatattctttagaacttaagaatttgcttgtaaaatgcgggctagaagattagacatacaaatttaatcatgattttaatgttatgttgcagtataaaacatatatcaataatagcagaagattaagtcttaatatctaggagtgtgcagcagttaactctcattataagaaatgagagtctatatataggataaaatttcttaatctgtaaataaattgttggagtgtgttgtaaaaatgattaaagatgaaattaaaattaattcagaagaaggagaggtttttgataaaaagcaaatagctttagcaattagaaattctacttttaatgatgatttaaaatgttctttgttagaggaagggatattagataaatgccaggggtgcagcttgaaatgcatttgtgatagcattgatcaagtagttcaaaactatattgataagactacagatgttattaataattttaattttgaataagtggatatagattaatatagttatataaaataaaaactcctaggttagccttggagtttttatgctttgatgccttcataataatgagatatattgtttaatattttctttagaatagtgttcttttttaggatagcagtagagtagcacatatttttaaaataagcatattcttttacagtgtaatttttgtaaaatacaaactctataagttcaagttcttcttcgtttaaattcttaagggctaattttaaatcctcatagtcgcacatttcacataatgaagtttcagttgagatttcaagttcgggaaaattattttctacatcatcatgtaatcctaatgcatcactaccttctgtagatcttctggttttagttctttttattaaatcattaatattatttttaatagcattagtagcataggcaacaaatctatgtttttctgaattgtacatggaaacagatttgaaaagtgaatggtaacattcctgtataatatcattggcattatatccatcaatgaaagtccttttagaaatattataaataaaaggtttaaactcataagctaatttttcttttgcttcttcatcattatctttgcacttggtaactaaaacttcaatataattaaaatccatataaacctccttcttcaactaagagtttgaattaaataatttacatatattgtgcctaatgttaaatttacctctacatatagtatatatggttaaaattcatataacgtatatgagtaattaaaaaaattaagaattataaggagagatgtaaaatgagcaattttataatagcagtaggtcatactgctagtggtaatgttggatgtggagttattgataagttagatgagagcaattgtacaagagaaattggagctttagttgcagagtatttgcagcagataggttatggagtcaacttacttagaattgataagagcaatagctataactgtgaagattgttatgaaagagcaaatcaagctaatgaaatagcaaagacaaaagatataaaactttatgtagaaattcatattaatgcaggaggaggtagtggacctgaagtattagtatttggaaagtcagaagtagctaatcaatatgctgctaaagtatgcaatgaattatcaagtgctctgaatttacctaatagaggaatgaaaataagaaacttaattgttcttaataaaactgttatgcccgcaatcttagttgaatgtttgtttgcagatagtgctgatgcagataaatatgatcctgagattattgcaagagctattgtcaatggattagttgaagatgaggtttatggtaatggagaatggaagaacggatggaatcaaaatgatattggttggtggtattgcacaagtgttgataataaatgttatcatatagcaaaagatggttggcgtgagattgatggggagtggtatatctttaatgaaagtggatatgccttacagaattcttggcatcatgatgaaaagaataatgattggtattacttagatgaaaattgcaagatggttagaggaagtaaggaaaagccgcttgggaagtgtattaatgggaaatgttattcttttgatgaacatggaagatggataaaatgatatagtgattttagaaagagataaacagcttgatttttaaatttagtatatcttgtttaagataatcattaaaatacactaataataaattttttaaatatcatctatagaaaatttataattattaaagaatgctcatgtcgatataatctgtcgataattctctggattcaggaattcattgaaataaaatcgatataaacctagtaaattaaagggtttaggtgctaaaaaaataataaaattttattgttttacacttgattttacactgtatagaaattttacactaggatataaaatatcctatgtttttttactaactaacaaaattatttgtctattaaaataggtataaaaaaagatgaatctagttccacatagtattaaacaaatcatttaattttgaagctgctttttctttcatactatcaagaacatgagtataagtatttagtgttactgatacatcactatgaccaagcaactattgcactgttctagctttttcattaagttcaaatagacgtgtagcataagtatgtcgtagatcatgaaactttctgattttaatattattttactttagtacatttttaaattgatatactatcttatctctatttaaatagttcccgtattcatcacagaatactaaattattatttgtatttttatttgctagttgcaatctattctgtagttgctcctttttatatttctttagaatagttataagaaagtctggaatatcaaccttacgtttgccttttttggttttgggtgtttgtatttcaagagcagattctccacgaccttccttttgatacgtccgttactataccaagatttttattgacattaatatatttttgggtgaaattaatatcatcccaagtaagagccagtaactcgccttctcaaagagagttaaaatgataatataagtatttataaaaaactaaaatttttgtttggagggattgagttttatggagattgtagcactagctctaaaatctaatccgatgctagctttaccggttgtaattgggtcatcggctttttttataacagatggattaaaaaaatgctgaagataacgagaaaaagttgcttaataatactagcaaaatgtaagacataagcaaaatattatatttggagataatagataccaccttttcaattgatggagttttaggagcgtttgcatttacaatgtcaattccattaattatattaggtaatggtcttggcacttttgttgtccgaaagattacaatgggaagtgtggagaaaataaaaaaatatgtttatcttaaaaatggggctatgtactcatttctatgccttggggttgttatggttcttgaagggtttcacgttaaagtacatgaatatatttcatctttgtttacaattttaataatagtgtttttcttctttaaatcaaagagttatgcagaaaaaaatctttcttaaaaattaaaatatagccttatatatgattaggatgagtgaataagttttataggttaaatcaatataaattaataacagattgtaaaatcgcattattcaattgaatttgcgattttttttacttcataatattagctagacattgtgagtttagaattttattagaaagaggaaaaacaaatgatgaataaattaaatgtagagtgcatgaaaattgataccttaataccttacataaataatcgacgaagaaatgaaaaagcaatcgatgtaggttataggcagcattaaagagttttgatttaaaaattcgattgtagtagataaagacaatatttcttttgatgttgctaggaatggtaatttggattgctttatatttaataaaactcgactataaaataaaattttatataaattgtaattaaaccgtaacgaaattgtgacaattcgacattaaaatacaagcataggataaataagcgtagcagattatcaggatattaatttaaaaaatggaggaaatattgtggcaattaaatcttttaaacgatatgaaaagaaattcataattaataaagaacaatacaataatctaatacctaggttattacaatatatggatgtagatgagcactgtaagtctggaaaaaattatagtatttataatatatattatgatactgaaaacagcgatgtaatcaggaattctatttctaaaccttattataaagaaaaacttagattaagaagttataatgttccaagcaacttgaatgataaagtatttttagaattaaaaaagaaaattaatggaatagttaataaacgaagggtcgtgcttactttaaaagaagcatataactttttagaactaggtataaaacctacatcaaatgattacataaataaacaagttattaatgagatagaatattatttaagtaaaaaatatgttaagccaacagtttatattggatatacaagaaaagcctttttcagtaaagaagatagagattttagattaacttttgattcagagatacttacaaggcgagataatttatctttagaatcaggtttctttggtaataacattctagaagatggaaaacatttaatggaagtaaagattttaggtgctatgcctttatggtttacaaacatactttcagaattacaaatatacaatactaatttttcaaagtatggtaatgagtatatgaaatattcattcgatcaacaaaataatatgacgaatacgagggggataaaacaaatatgttagatatgctaatttcatcaacaacttcaggagatttaaactttgttaacacattaactattataacatcatcaattattcttgggataataattagtttagcatacatgaaaactaataagagaaataatgcaaatttcactactacattaataatgttacctgtaataattgcaattattatcttattagttggtaataacgttgcaacagcttttagtctggcaggtgcattttcgataatccgttttagaagtgctcccggagatcctaaggacatagcctttgtattctttacgttagctgttggtcttacttgtggaatggggtatgtaggctatgcagtaatatttacaataattttatgtgtcttaatgatcatactagatttaataaaatttggagtgcctaagactaaaaatatgctccttaaaattacagtcccagaagatttaaattatgaagacaccttcaatgaattattaaatgattatacaaattcttggagcctggaaagagttagaacaagagattttggtgcactatttgaattaaattacactattaacttaaaggaagaggtaaatcaaaagaatttcattgacgatttaagatgtagaaatggaaatctaaatattagccttatactttcaggtaatgaagaaaacctataaaaactaatgtgaaattttggaggaaaaatttatgaaaaagaaatttataaagattttagtagccttatccctgtgtgcaagtatagtaggatgtgcaaatcaaagtgctacttcaagtaataatacgtcaacgacccaaactgaaacaacatcagattctactgttctttcgaaaattaatatatcgtatggcgacagtgaaagtataggaaaagtagatacatctatagagttaggaaataatattactgttaatggtaatggtgcaacagtagaaaataataaagttactataacttctgaaggtacatatagcatagaaggctctataactgatggtcagataatagtaaatgctggagatgacgataaagtatatattattttaaatggtgcaaatatcacatgctctaatagttcacctatttatgtgaaaaatgctaaaaaagcaattatttcattagctgataatacacaaaattacgtaaaagatggtgagtcttattcagttgaagatgcatctactgatgagcctaatgcagcaatattcagtaaatcagatcttatatttattggaaatggttcattaactgttgatggaagatacaataatggtattgcaagtaaagatgatttaaaaatacaatcaggaaatattactgtaaatgctgtagatgatggtattaagggaaaagactctgttgctatagctaatggaaatataacgattacttcaggcaaagatggaattgtatcaaataatgatgaagatgcagaaaaagggtatgtattagttgaaggtggaacaattaacattactgctaaacaagatggtattcaagcagaaacaaacgcttttataaaagatggtaatattacaattaacacaaatggtggaagtgcaaatgctcctgttaaaaacaatgatatgggtatgaaaggaatgggacagcaagcatcttctagtactacagaaaatgaagaatcatctagctctaaagctataaaggcaaatgctaatatagtgacagaaggagggaacttcaatatagattcttatgatgatgctttgcactcaaataataatttggtaattaatgctggaacatttaatctatcttcaggcagcaaaggaattcattcagattcgactttaacaataaatactggaaacatagatattaaaaaatcttatgaaggacttgaaggtgaaacaataacaatcaataatggaaatattaaacttgtatcaagtgatgatggagtcaatgcttctagtaaaagtacttcagcaggtagtacaaatggacatgctggtcagggaggttctgtaggtaatgctacattaaatattaatggaggatatcttaatgtgaatgctgatggagatggtttagatgcaaatggatcaataaaaatgaaggatggtactgttatagtaaatggacctacagctgacatgaatggagcattagattatgatgggacttttgaagcaactggtggaatgttaatttcggctggaagttcaggaatggcactagcaccgagcacagattcagcccaaaattctataaaaattactttagcatcacaatcagctaatactttagttcgtattgaaagcgaagatggagaagaaatcgctacatttgcaccagcaaaacaatatgcatcaattgttgtgtcttcttctaaaataaaaactggtacaacatataaagtatatgttggaggaagtttaactgggacagcagtaaatggattatattctgatggaacatatataaaaggaaatgagattggaagtgctgtaatatcaagtcctgtaactgaaataactcaaaaaggtgtaactgtctctaaagggataggcggaaatcatggtggaatgaaaggaggagcagcaggcgctcaataaaaaaatgtgaatgctgataaataataaaatcagtttatataaaattatgtataaactgattttttatctaaagtgtattttaactctttcataacttttagaggaggtttaaaatttgactaaaaagaaaaaaatcatcatttacgcaagtttatctgtgattgtattagctgctattttattttcgttagcgtatagatatttaatagaaagagtggagactccggtttcagcaaatacaactgcaataataactggatctaaaaataataacagcgaagcaactaaatatataccatagaaaacatttaaaatatgtttcataagataaaaaaaggggattgtttggggattcacgctgggagtaccaaatttgataaataaattgcttaaggatacgtggtaatgaattttttatttctatgaaatgagattagattgtagaggagaaacaaacgcaaggttctataagatcaggacagggagttataacaatcatatgttgaaaccttagaaataaaaacaataattaataaagaaccgggggagataacctttttcaataaattacattaccagaaaactttttttgtaagttgtagagcatagagttaaaatatatgtataagaaattaaagctatattaaatatgaaggtattcacttatcatgtgaatatctttttatgtacttaattttagtagacaattagataactatatttaatatcctatatatatgtttataaagatgatcaataaaaaaagagaagtaaaataaatttacccctctttttacccattatagaataatataaaacaacattatcaaaaatcaaataaaataagaatgacgatataacatggattgagacgtattaaatattaagtaattagaactcgattgttcctagagttcgtggatttgaattttactacattttataaccaagagtatgtagaagtacttttggttatagttgtaggtagaaatactccttatgctgaatctaataagttaactatattcaaaatacattggattataaatgaaaagaatactcttgttttcataaatttaatttgtttgaatttgtgtagattatatttaatattgagttatagggggaacatctatggaaatataggtgcttttcttgcgtatatgtaataatatataaatatacaacgataggggaataatgatgaattatttaagaaatttattattaacattaacaacagtaggagcggtattaagtttttatataaaattatgtagagatttttttatagaaaccatcaaattaaattataagaatgttccaggtaaacagtcaatttttgaaataattacaatatggattatgtatagtagcataattatatatatagtttgggttatagtatttatattaactaaaggaagtatgatgaatataaagtctacagatataataactcaagatagagtagcatatttaattgctgcaataatacttattctatttttgaattcattttcatgtttggtagttagttttcatatactaagaaaatattttatttataaattagagagaaaatgtataaaacgagtaagcaataagatgcgattatggattagggggagcaaaataacatcatcattgttatgtttgattggtatgtttgtaataatatattatccaatgcttcaaatgtcgttattaaaagaagacagaaattttatatttataaacacacttagcgtagaagaaatatctacatttgctacatatggaattatagcgtttataagcttaacgttttttataatattaaatagtatggaggaaattgcaaaaactttaaatgaaaacttcacttacataattttgacggacacagaagagatagcatgcaatatttatttagaatataatgagtattatttagtatttaggaatggggtacagagatatataagtaaaagtaaagttaaagaaataaataaaagtacttactattatacagacaagattttaatttaaaaatatgataaagattacatatagaaatttaggtattcttttggcattgtaataatttattctttggtataaaataggtaaaaaaaacaaaatgaattttaaaggagtgattttgtgagcggaatcatgtatttgtacgtatctgataaaaatggcgcacataaaatacctaaaccaaagcgttccccttatacatatagtacaacttataaagcagttcctagtttagcaaatgaagaagtattacttgtaatattatgctatgaaacagtaaatcgtaaacctcatgaattagaccttgtatcatttcatagagccagattggatgaaaaaggatgttatatacaggacaaagaagagcttaataattctttgattaattttgttaattatgcttttgcaacgtctgatgagttagctttaagagatacaatacctataccagttgcgcctaaaaacatacctacagaaaacgaaaaaaatgcactttattcatatgttaaagaaaattatccgagcttatggactaactgcccatatttagtagaacagaatgttaaaagtatggaaaagcatcataatgaattaaaagaacttgttaaagaagcatataagaagaaaataatataaaaatattaagcaaaatgcaatcttaaaagtataagaatcactcattttgaatttactattcaaaatgagtgattctttgttatatataatatgtaattataaaagggatgtttaccttaagggaaaaaatacattaagttaaagtaaattacgataaaatataataatgctctaaaggtgctaagcatcagtatttcaaagtattataaaatgcaatttagtgcaagctgttaccaatacagaattcggcttctctcaattaataaaatttagattatattaagttaagtttctttaaacgtttataaagagtgacaaaaggctttattttaccactaacaagtcttttaacagtagctatattcagcatacttagcattagtatatcccattttctttttctacgcattaaacttaatagtaacatatttatagtttagtggtttattattcttgagtttttaaaaacttcaatatctttaaattctaaataaatactataggaaaattcagtttttctaatcataattctttctaaagcagaataataaatatcaaatattttaaataatgagtatagatatggtcttcatttctttaaacttcttaccagaattattgaatataaactagtaatatccaaattattttggagtaatattaaagatatcgcaaatatctttaattgaattgttttcgagttatatttcattaagtttccattgttgaacagaagagcaataatgtctaatgacttcaccaaagcctattccatcaaggctgttgcattttcttatcgcaattattttttctactaatgtattttcaagtaggtaattagatatctttttatatagattaaaataggaaactatttggaatgaattagaaagttaacagaaaaactattttactggcactagtaagaagtggttttaaataaagagtaaatgtaactataatctaggtattagtaaagttggcagaaggtataattatagatagtgctcctttaatgaataaggtatttaaaaaatacaaatagcacaaaatgaaaaaaacacaaatgtgttatttacatgtattatttggtgtagtaaaattggattatgaaaaaatgtctaaattataaaataagagaaattagggtaagaaataacttaacaattcaacaaatggcaagttcactagaaattgcagcgtctacacttggaatgtatgagagagggatgcgaaaaccagatatagctgtaatggctagaatagcaaagatgcttaatgtagatattaagtatttttatgaagaagattttgaaattgacgaaatagcttctaatattgagtacttgcaggatagtaaattagttgacgaggcaaggaggcgagcaaatggattttgcgaattatgtgaagctagagcaccgtttattttagataacggagaaccgtatttagaagtatttcatataaagtctagagggtataataatgaaacaaatgaaatagtactactatgtcctaattgtaataaaaaagttgaaattataaaaaatcctggtgacataaattatttacttagaaaggtgaggaaaaatacaaaagatggatagatgtgaaattttaaagtttatagatgaaatggaaaagtatagacaagcaggaggaaaaagaagccaaaacattggaaatattttaaaaagaactttagaaattaaagatttaataaatgaaaagtttgcattagtttttgttacagacaaaggaattggtaagactagcattataaattatttattagatttatcatatgaaagagaaaagaaattaaaaagtggaagaaaaacaattgtatatcaagatgttttagaaaccggtgcaggagctacaacaacatctgagacagaaatagttcaagcagaaaatgattattgcgaaatagaaataattccagttggaaaagaagaaatggaagaattattaaggggatttgcacagtatatttttaaagaaatatatgcagagtttaaaggttatagctcaatagcaccagaaatatttagagcaatgagaaacatgacagggctaaaagaagttgatcgtgaaaatggggataaaatagatttagctaaagaattagcaaagggttatgatatgcatgattacttattgtttgaagatgaaatatttataagagctaatttacaacatagaataaaaaacaaatttataattgatagaggaagcgaagaaaagaaatctattagaagcatatttaataaaatcaatctaatgagtatggaggatattccattacctaagaaagtaattgtaaagttatcaaaggatatatttgattttaatactctaggttgtatagataggataattgacacaaggggattggaatcaggagtagtggcgacagatagaaaggatattagagaattatttaaaaaagataaaaataaggttgttgtactagtagataaatttaactctccatcacaaagtataatgaggttagttgatacgtacattcaagagggagattatgaaactcaaaatagagttgcatatttagttaattttcgagatggggagccagaaaatgttgtgtcacattcaggaaagacatattcagaaattcgaggaatagatattaagtgcgaagatatacataagtacattaaaggtaataatattaatttgaaattagataatataatctttacaaatcctaaaagatttttagatgctaatgggaaaatgcctatattagaagaagatatagaagattatggagatgctgtatcagcacgaaaggcaaaacaagatataagggaagagaaaaaaagagaattatgggatgacatatatcgaattacagaaaactataggaaagaattaattaatgaattaagtttaaaaagtgaagagtttaaaagtattaaaaataaagagattgaggagttaaatatagactttgagcagattgtaaattttattaataattttaatgttgataataagaatgttgaaaatttcccatttactatttttgaggaatatatattaaattgtcatcatagcacacttatggcgttaaataacagacatggagtatacagcaacagagatatatatctagtaggaagtgacaaaattgaaaagttatttagaagtagtttgaaggatataacattaaatgtaattaacttaatattaaatcaagtttctactgaagaagaaaagaaagtaattatgattattataaatgatgttaagagatattgcataaacttcatggatgaaataaacagctttgcatatgaatatttgagaaataatatttttaacaaagaacaaattgaattctggaagaaaacaattgagagatggggaaaaggaagtccatatacattagatatagatagttactataaagaacaattagaaaaagagaaattagataagtacattagagatgctgctactgaatggattagaacatttaaaaatggattaatagctgtaatagaagaattcgcatagaaggtatataataaatataatagtaatcagctattggaattggaagagcaataattttggggttctaatttgttgataacaacagaatcaacaatataaatacaaagtatcctactaagcattgatatattacttaatttaagaaacggtcggaagaactaaaaattccaccattcttccgaccatcaacaagatatgctatattattttaaaatataatatgtaaagaaatgatatttttaatctgaggtttgatttatttctaatgagtaatagatataataaaatattctaagttatgatttgataaaacttttcaacacacgcctcacgctgaaactgtagtgaagctaattaaataatgtagttattaattagaacatactaattccaaccaaacaccagcgatttccaccaaaccattatgaaactgctatcttggtcggaattcaattcaattaaaaattcaatcaaaatctagagctgagaggaaaattttagctcttttttcatacggagagttatagattcaaggaagaatgaatatagtgggaaatggagatggttaattgagatatagaagtggtatgggaggtaaagtaagaaataaatatgtttaagtttcataaatatgtagttgcattactactatagaataacttatgtataagagtattgaatcggtttgattaaaattattgaatggcttctgcgatgctaataaaattagctatgcagaagccatttttgtgaaattattataatttgaattgatgaatctcagcatctagtttatctgctaaatccttaagattagtacaagatgaggcaatttcatgcattgcagcagactgttcttcaactgcagctgacacattttcaaattctgcagctgtttctttagaaatcttgtcaacgtcatttatagcaataacaactttctggctaccattagagatttcatcaagtgataaagatatctcttttattcgcttaaccagatcagtaaccatcattgatattctattaaactctccaccagcagaatttactctatctataccttgactaacattgctaattgcattatcgattgatgttaccatgttatcaatatttttgtaattatttgttaccagtatagaaacttgtttagcagcttggtcggattgttcagctaattttcgaacttcctccgcaacaacagcaaagccttttccagattctccagctcttgcagcttcaattgctgcatttaatgcgagtaagttggtttgttcggcaatacttgaaatcatttctactattttgccgatttgttttgagctactttccatatcgttagatgaaagttgtgcacgcttagcagcttgatttacactatccatttgtctaatggtatcattaattgattgctgtccaaagctggtagctttagctgcttcgtctgcaatagataccatgctgtttgcattatctgcaacatttttaatattatttgatattctttcaattgttagtactgcttcatttattgcttgtacttgatttgagttttcctctacaagatgtgttatagaggaagcaacgcttgaagaagcttcagcagattgttgggaactttcagtaaaattttcagcggattgtgcaacttcattagtagagttattaacatttgaaattaaggaacttagtttcattcgcatattatagaagctatacattaaattatgtatttcgtcattgctattttgatataatttaggttcagtatcaattcttaggtcaccagatgctatattttctgccattctctttatgtctttaattggattcaatagtttgtttgtaataactattataatagctcctactaaaactaacccgataatagcagtgattatagaatttagtgttagagtgtttacatctttaaatagctcgcttttaggagcaaacactataaatttccacccagttgtaccaattgatgaagaagatatgatcatatctttattatctataggtccgactattacagctgattgattactcatgatttgagaggcatagtcctttaggttaccattattaacttcaagaatgttttcagttagatcaaaatctggatgatatataaacttacctttatcatcaataataccaacataaccagtatttccaactttaaaactacttgctaaatctcttattttattaatgtccatatctacgccggtaactccaaccatttgaccattacgtatgatttttctacttatatcgactgttaattttttggtgttagttgtttcgaaaattggggtgtaagcgatatcgtttgagcttttagcgagagtataccatacgcgagtagtaggatcgtatcctgctggtttttcttttattgttactccttgagaatccgtacatgttttatcttcataaccatcaaatacagaattaactccagaaatgctggtctttaattgtttaaaaaaatttatgcgctccgcctgggtcatttccttttcacttaaaactttactagtaacttcaagtaaaacttctttttctttcaataatttatatatttcgtcacttccattttgagataacgaagttatattttgggtaatttctttatttaagacgttgcgagatcctaaataagaataggtacaaagtccaacaataataataagcatgggtaataataaagaaagtaacattttagttttcagatttaatttcttccacatgataaaactcccttctaaagttgaataaattcgccaaaatagttcaattcattaatggtaaaatgtgatttttttctataattgtattataactaataaatactcaaaaagtctatatgtgttttggaaaaatagataaaaaaatgtataataagcgttatttttaaaaatgaaattttcaatatggaaatatgtttatgttcgtaagctggactaaaaggatgtatcagataattattgtatttcactaagtacagatatattattagataataaatatataaatttttattaagtataaaaatattgaaatcataattgttatattaaaaatgagcatttgaaaaaagaggatatgaattattttaaaacaacaatcatgtattattattttcaaggaaagaaattaataaatgtattatttttagcatggaaataggcctgtggatttagaagtttagggaaagaagcttaaaatatatctctaagacatattttacaatagaaataactgaagaaaatcaaatcaatttatattgtatttacatttatattctacactcaaaagaggaaggtgatagatttgaataaaattttagttatagatgatgatgattatatacgagagcttatttgtacagtattaaaaaatgaaggattttctgtagccgaagctgtaaatggaagagatgcattagaaaaacttggggaggaaaaaattgatctttgtgtgcttgatattatgatgcctcaaatggatggatatgaattttgtaaacaagcacgcagatattatgaggatatgccaattttaatgctcaccgctaaaagcgagctttcccaaaaagtaaagggctttgaacttggcacagatgattacttaacaaaaccatttgagattgatgagttgtttgttagaataaaagcgcttttgagacgctataaagtagctgcttcacggagtattaatattggtaatttagttatggataaaagtagttacacagtaattagtaacaatgaacaattcgatataccaatgaaggaatttgaacttttatttatgcttggaagttatcctggtaaaaccctttctcgtgacaggctcatagaagaggtttggggccttgattttgaaggaaacgaacgaactcttgatgttcatataaatcgtattagagagagatttcagtctgatatttacaagttcaaaattactactattaggggtcttggttacagattggaggaagtgaagtgaaggaaggaaaaaggtattttttttcactaatactgatttttattataacattacttggtcttactagtggatattatatttgtatatttattttcggtaaattagaaagcattcctctacatataatatttattgttcaaagcttaacttctgctgtgatatattttctaggttggaaagcatttatatatatgcactggcgcttcgctaataaacataaaagatttaatctttcacattttccaatattaagcggagctgttgaagccatgaacaagatagcttctggtgatttcaatgtgcttgttaaaacaaatgaactcgatccttttaatgaggtagcagacaatgtcaacagaatggcaaaagagctaggttctttagagaaactacgtcaagattttatatcagatgtgtcacatgaaatacagtcaccattaacttctatatcagggtttgctgctctgttaaaaaaaggaagtttaaataaggatcagatatcacattatgccagcataatagaaactgaaagtaagcgattatcaaagttaagcgaaaatctattaagattgtctaatttagaatcagaagacaataatttagacttaaagaactatcaaataaacaagcaaattgaaagtgttttacttatgttagagccacagtggtcagcaaaaaatataacacttgatatttctcttgaagaaactatgatatgtggagatgaagatttattaagtcaggtatttataaatttgcttaataatgctattaaatttacgccagaaaacggaaatataggtgttaacttatataacgatgaagacggggtcgagtgtaaagtctccgatacaggtataggtatttcatcggaagatcaaccgagaattttcgagaggttttataaagcagataaagctcgtaatcgttctttgggtggaaacggacttggactttcaatagtaaaaaagatcattgacttacatggagggaaaatatctcttacaagtgaaattggaaaaggtacagaatttattatttggttgcctaaggtatatgaaagaaaataacaagtcctaatattcaggcagattgacttgttatttttttaataatgcgcaaatagaagctaaatatgttcattattaaagtctgaattaacagactataattcttggtttacattgagtttaagttccatttaagtttagtttaaatagcagccatatactatttttgtagaaactaaacagtgtttagaaataatattatttggaggtataacatgattgaaacaaaaggaaaacgtatgatgattgatccaagccaacctggcaccgtgtgctaaagatgcatgcaaagcctgggaaaggtgatgctttatttgaacttaccaataaacttcattataacggtgatacagatggtcctgtagattggatactctgtagagctgatgacgatccggataccttgtgggcttttgagttctacaaggacgaggaatcgttcaagcgtcacttctcaaatcagaatattgaaaagtgtcatgatgaggttatcgaccttctgagtgagatgcctatgagagtcgaagttcattcagccttctccagttatcaactcaaggtggattaaaatgtttataaccacagtctgaatcaataggctgtgatttttctttttgtttacattgcgtttaaatttcatttaaattaagtttaaatagcagctatatactatgtttatagaaaacaaacaggaattagaattaataatattaaaaatgttgcgcttttattgttaagtgctaattttgttactaatacaaggcgaaaggagtttttttatggaaaacacagaaaatatagatgaaaaatcactctactatcttgaaaaggcacctgttacaaaagcaataatacacatggctattcctatgatactaagtagtattacttcagttgtctataatatcatcgatgctttttttataggtaagcttaataatactgcaatgatggcggcagtgatgctagcattaccattttcatcagtgttaatggcacttgggcaaatgtttggagtaggttcaggaacatatatatcgagacttttaggtgagggcaatacagatgataccaaaaaagttagttcaattaacttttggtcatcaatgcttatgggtattatttttatgatgatatgtttgccttttttatcttctattttgccgcttttaggagcaagtggtgaaacattacaacacacaagaaattttattatgatacttgttattggtgctccagttattattgttaatatggcacttgaatcagctgtacgtgcggagggagcatcaactgtttctatgactggtactataggcggtattatagttaatataatacttaatcctttattcattttcgttcttaatatgaatgttatgggatcagcgttagcctctgtttgtggtaatatagtgtccatttcgtattttatatattatttgcaaaagaagagtactgttcagagtttgtcaattaagtactttaaaccaagtaagaaaatttatggtgaaatttttaaggttggagtttcagctttattgcttagtgggtttatggtcattataggtctgcttttcaataattattccatgatttatggagataatgttgtggctggatttggagttgcacaaagagttgttcaaattgtagattgtattggtatggggtttgcaatgggagttgtaccactaattgcatttgcttactctgctaataatcaaaagcgtctcatggaaatcgttaaaaaaacaatattgtatattctgggtctaacattagttataggggcagttataagtatattcaggatacagattattagccttttcagtattgacccagaggttattactattggtgaaataactcttatagcccaactttcctcaactatatttgctgccctatgtgaattttttactggaatcttccaagctcaaggagctggtgtacaatcaaacgttatggccgctgtgagaggagttttatttattcctattttgattgtaggaaacttaatatttgctgttaacggtgttatttgggctatgacagctacagaaggactctcatgtctgataggaattgccctatggcttggaattagacgaaaaagcttactagcaatataagttaaccataactttttagctaaacgaagataagcagaatggtggacttggatagtgttgtaaaagtatgctttattaagtactaagagatttttctgaatataattaattaaaaatcctttgactgtagattcatatagttagaggatttatttttttacatatttttaatataaataagtattactttatcttaaaacaaaaatagcccctaaatcgaaggggctagtgaataggttaaaacaaaaaacgactatgaatggagagtaactaaatgagaaacaaataacattcaagaggtttcttttaattatatgaaggctaacatcaaataattctaaatagtaatagataattcttcgcattaagaaactgtgatgcaaagctagaggggggccttttgaaaagatagcagccatttgcaagtctttgcctattggagtgaataggaggaaaatgaaatgaatgacaaaattttaatttgtgatgatgctagattcatgagagttactttaaagtattccttagaaaaagagggatatcaagtagttgatgaggcagacacccacgttattttcttttaacaatatattaagaaatgattaatatatttgacaaagaactgacaagaaaaaataatagtatattcataaggaagggagtttgatatttatgttaagagaaattgaagaattaaaagttaaagataaaattacaatagaagataaacaaatgcttagaaaagcactagatggaataaagggatggaagtttaatccggttgcagtgattacaaatggaattgaagattattattttatatgtagagtaaaaacagtgataaaagatttacaaatgaagatggcaaaagtatatattaaaatacaagaggggagtaaccctagactgttagcaatagaggaaatataataatttagatacatgaataaataaaagcggtaataaatttatatctataatgtatagaaaagcaatttctaagtaaaaaccggagattagattagcaaataaagatgtaaagcagatattacaatatcagaaatttttcgagataggctatgttataaaactagtcctatcttatttttatgtgtattttgggaagacttataatttgtaaatagatattgcagcttaataaagttttttattactaattcacttagtataaaagtggagaatgcatcaaatgtaaaaagctttgtcattaaaaattaaggcagtttttgttagaaataatttattaatgacaatgctttctatatgaaagattaaaatatgttgattatgaagctaatgatttttctaagttctttataaaagtattaagaaaagttattagatttattaattataatatttaaatttgaaggaatataaaaatattatataggcaaaagtacatgtagtaattaaaataatattatgaagatatattgcattacataagatacggggaggaaatacaatgttaaagataggttgccatttatcggcttcaaaaggattcaagaatatgggagaagaggctattagcataggcggaaatacatttcaattttttactagaaatccaagagggagcaaagcaaaggctatagatgaaacagatataaaagaatttttaaagttagcagaagaaaataatttctctaaaatattaggtcatgcaccatatacattaaatgcttgctctgcagatgagaacacaagaaagtttgcagtagagataatgaaggatgatttagaaaggatggagtatattcctaataatctttataattttcatccaggcagtcatgttaagcaaggtgtggagattggaattaaatatatttcagatatgctaaatacagtgctgaaacctgaacaaacaactactgtattgcttgaaacaatggcaggaaaggggaccgaaattgggcgtacatttgatgaattaaaagagattttaaataatgtagaattatcacacaaggtaggtgtttgccttgatacatgtcatgtttatgatgcagggtatgatattgttaataatttagatgaagtagtagaacagtttgataagataattggattagataaattatgtgcaatacatttaaatgatagtatgaattcatttggaagtcataaagacaggcatcaaaaaataggagaaggttctattggattagagggaattaagaatattattaatcatccaatgttatgcaatttaccatttttccttgagacaccaaatgagcttgacggatatgcaagggagatagaattattaaagagtatatatcaaaattaaaaatatttattgataaaattatacgctgtgtatagcgtaattttactaaatcaaattgcataatgaataaaaaataataatatagcaatattacttctataataaatattaagtaatatagagaattatgatatacttaagctgttaaaatatacataaaaggtggaaaaagttatgaggatcacgaagaagagaagttttgtttttataacaattgtaatgggaatatttttattaataggttgcggaagtaaaaatgctagcaatggaaaaggcgaagcagataattcctctaaaacaagtgaaagcaatgaggcaactccatcaggaaatagtaaggacctgccaatagctactataaaagtagaaggattcggagaaattcaagctgaattatatccggaaattgctcctaatactgttaacaactttatatatttagccaataagggcttttataacaatttaaaattccatagagtaattaaagggtttatgatccaaggaggagatcctcaaggaaatggaaccggtgggccaggttattcaattgaaggggaatttacttctaatggttttgcaaacagtttaaagcatacaaaaggagtattatctatggcaagagcacaagatcctaacagtgcaggaagtcaattttttataatgtcaggagatgcaccaaatcttgatggagaatatgctgcttttggaaaagtaatatcagggttagatatagtagataaaattcaaaatgtagaaactagttctgctgatgcacctaaaaaggatgttgtgattacatcaataactgttgatacaaaaggtgttgaatacaaagaaccgaataaaaagtaaatttataaatgtagcttataatttaagaataaatgatttagtggagacttatatgactaatatcaatcatataagtctccactaaaattttatcaggcatttattggatagcttgagtgatggagtttattttatcactgggatgcttattccaattatttttccaagatttaatacattcatataggattataattaacatagcaagtattataactgataacacggttaatgtagtcttaccatttggaatatagttattaaagatattttcaatagaagctgttgaagttgttatagcgataaatatcataggtaatattgttataggggtatatttcttcttgcccatctctataagtacagaagttccgattgcaaaagcaattgcggcaagagtttgattggctactccaaataggggccaaatagttgaaatgttaccactataaagtaaggctccccagctaagtgacattaatgcactgaaaaatactagattaaatttagaatcttttttagaaagtggtttgtacattttgccaaaaagatcttgtaataaatatcttcctattcttgttcctgaatctatagttgttaaaataaataatgcttcaaacattatacagaaatgataccaataagacattaaggttgatgcaccaggtagcttttggaatacatatgtcataccaacggctagagacacagatccaccaggccttccggcaagtttctcaccaacaagtgattcgagcattcctaaatcttttgggaccaaatttaatttatcaaaaacttctggcaaagaatttatggcaaaatagtcagctgtaggcaatgaggtagctgcaatcaatgccatgagggagacaaaagcctcaagtaacatagaaccataacctattggaagaatatctttttcactctttattagttttggagtagttccagtgctaataagtgaatggaacccagatagcgcaccacaggctattgttatgaataaaaacggaaatactttaccgctaacaaccggaccaccaccatgaacgtattgagttagtgcaggcatttctaaatttggtctgactattattataccgataactaaagcgccaataactccaagtttcatataagtacttaggtaatcacgaggtaataataatagccatacaggtaaagccgcagcacagaatccatagattactaatattacagatagttgtttagtatcaagagtcaaaaaattaccaagagttgtaccttcaatttgtggcccaaagataactgcaagcattattaaagccatacctattatagtagcttcacctattttaccaggcctaatgtattttaaataaattcctataaaaattgcgattggaatagtagctccaactgtaaatgtaccccaagggctattataaagtgagttaacgactggtaagccaaggccagccattgtaattattaatatgaaaataactgaaatggaagtaataaagccaattctttttcctaatgtatgctttgcaatttctgctatggactcaccattaaacctgactgatgcgaaaagcattatcatgtcatgaactgcaccagcagcaacggaaccaatcaatatccagagagcaccaggaaggtaaccaaactgggcggctaaaacgggtccgataagaggaccagctcctgcaatagccgcaaagtgatgacctagcagaacccacttatttgttggaacataatccttgccatcattgtatatttctgaaggaacttttttagattcgtctaaaaccaatacctttgcagcaatgaaagcaccgtagaatctgtatgatagtattagaattaaagcaccaataataactaaaacaatagaattcatatctacatcccctttgtgtaaatgttttcttacatatataatctaacatcagaaataaatagtgactatattttgtatgtgaaatgctatatttagtggatgaattaacaaaatattgaggcggtttgcagtaagtttttatataaaggaagtaaaagttgagattttattacatagtagtataatttatgtatatagaggtaaaagggaggtgatagcatgttgatggtgaatatgctagagagaatggcacttataacaatatttatatatgtaatattacagactaatattatgaagtgtttagttaaggacaagtttgatagaaaagataacataatgatgattctgatattttcactccttgctattttaggaacttattttggaatatatataaaagatcaatcattagcaaatagtagaccagttggagcaatagttgcaggatatttagggggacctgttattggaattatagttggatttataagtggattgcataggtattcgtttggaggatttacggcgttagcttgcggattatcaacaattgtagaaggtgcaataggtggaggatttagaatattatttaagaaaaagggcctaaatccagctgttgcagggttagcagcagtagtcgcagaaattactcaaatgataatcatattaatattttctaaagatataaattcagcgatagagcttgagaaaacaatagcattatcaatgatacttataaattctattggtgtatttttaatagttatggtaattgaaagctcaaaaaaattggttgatggtgaagtaaaacttataaaattaaaagaagaaaataaagtagcagaattaaaggctttaaaagcacaaatagagcctcattttttatttaattctcttaatgtgataagtgcatattgtagaactgatggagaaaaggcaagggaacttatattaaatctttcaaattattttagagctacgctagaaatagaaggagatttttctacattaaaaaaagaattggctttgataaaggcttatgtagcaattgaacaagctagattctcaaatagactagaagtgaaatttttaatagatgataatttactagatataaaattcccaatacttgtacttcagccaattgtggaaaattcaattaagcacggaatactgaaaaaaattaatggtggtatagtaacaatttctattagaaatgatgaaaatgacgttagtattgaaattagtgataatggggtaggctttgaaaatgcagatgaatctttatcaactggacttggccttaaaaatatcaacaatagacttagattattatatggagaaagttactctttaaatatagtaagctcaaataatggaagtagtgttaactttaacattccaaaataattattataattaatagggggaattaaattgaaattactagatgagataaaagtagcaatagttgaggatgaagcaatatccagcgatgaattaaaatacataatatctaaggatggcagatttaaagttgtagggcaagcgtatgatggaataagtgcattaactttaattgaaagtgaggagccagatattgcttttattgatattaatattccgggaaaaaacggaataaaattggcagaagaggtaaaagtgatatttccggatataattctaatttttttaacggcatatgatacttatgcaataaaggcttttgaacttaaaatttatgattatatactaaagccatacgatgaaaagagaatagcggaatcattaaactgtgcgttaaatacaattaataatagaaatgaaaatgaaatatttaatatattaagcaagcttgaaaataaacaagcattgaagaaaatcccgtgtgagaacaatggaaaaataattcttatcgatattaacaaaatttccttcttttattcagagggagagaggaattatgttaagactaatgaagagatttattgtacaacaaaaactttacaagagctaacggagaaaacaaatttttttagatgccacaggagttacgtagttaatcttgaaaaagttaaagaagtttacccttggtttaatggtacttataagttaattattgatgataatgaaaataatgaaataccggtgagcagatctcatgttaaggaaataaagattattttaggactttagtactagctccagttttagaagtatataaattttagaagaatattaattaaaattgagtttttaaattaaggaattagataaatttattgaacaaaatattaatttattcatttgtaatttatgaaaaagtctaaataaaggataatctttgtatgtaatcttaccaagattaacaatgagtatcctttatttggattaattattatataaagttctgtattatctcagttatacagtctttttgcaggcgcaattataaaaatcaattttgtaattaattttatcaagatttctttgtaattcagctatttggctaataacttcttcacggtgttttataaatatttctctacgaacatcaatagtattatcacctttaaggcataactgaatatattctttgatttgctttataggcatacctgtattttttaaacaacaaataagttcaagccgttctaaatctttttctttaaaatctctgttgcctgactcactgcgatccacaaatggaagtaaaccttctttttcataatatctaagagtgtgtggacttaaatgtgttttttcagcaacttcagcaatactgtatcccatagtattaccctcctttaaactgcatgatgtattttataacttagagtatactctaagagtaagcatttgtaaaattgcatcaaaaaattgtttaatataaaagttataaatgatgaatatggtattacaaataaagaattactttttaattttaaaacaatggttttagtgctgtaataacgaaattaacttttcattttagagtttatttttccaaaatatgttgacttagagttaactataagatgtaaaatatatatagaacaatttatcatataaattatctattttaaggaggaattactttgttatatagagggtttggaaagacaaatgaaaaggtttcagttctaggatttggttgtatgaggttacctattattgatggagatactactaaaattgacgaagaaaaagctacaaaaatgattcgccacgcaattgatgaaggagttaactatattgatactgcatacccttatcatggaacaggaatgggaaatggaggggaaagtgaaccatttgtaggtagagccttaaaagacggatatagagaaaaggtgaatttagctacaaaacttcctagttgggcaattaagactagagaggatatggataaatatttaaatgaacaattagagcgattgcaaacagatagaatagatttctatttagttcatgctttaaataaaggttcctgggaaaatttaaagaagttaggaatagatgaatttttaaactcagcaattaaagatagaagaataagatatgcaggattttcatttcatgataagttagaagtttttaaagagatagtggattattatgattggtcattctgtcaaattcaatataactatttagatgaagacttccaagccggaactgaaggcttaaaatatgcagcagatagaggtcttggagttgttatcatggagccgcttagaggtgggaaaatagttagaaatcttccggatgtagttactgatacatttgataaagcggaaattaagagatcttcagctgaatgggcactaagatgggtatggaatcatccagaggtatctgtagtactaagtggtatgaatgtaatggataatgttactgaaaatattagagtggcaggtgaagctttaccaaattcactaacagaaaaagagctagaaataatggataatgttaaaaaagcatttaaagaaagaataaaagttaattgtacagcttgcgagtattgcatgccatgtccagcaggcgtaaatattcctaagaattttacattatataatgagtataatatattcgttactccagcaacagaaaaagaacttaaggaaagatataatggagtagcaccatcagaaagagcagataaatgtgttgaatgcggtaagtgtgaaagccattgtcctcaagcaatcaagattcgtcaagaattaaaaaatgttaaaacaatatttgcataaagtaaaatattacaattgacaaaatagtttctagacagttgaaaaaagatgattacattccaaaagaagaaaaaaatttatatattcaaaagagtatttttggataattaagaagatataacatcagatagacaaaaaataaatttattagaatcatacaaatgagttaaggagtgagctaaatgagaatattatattacgattgtttttgcggtataagtggagatatgaatctggcagcgatgttgaacttaggagttcctaaagaatatttatttaaagaaatttcaaagcttaatttaaattctgaatatgatatacaaattaacagttctgagaaacttggaataacaggaacaagagtagatgttatattaaaagatgaactaaataatgcagataacataggatatgaagattttgagcattgtagtaatgatattataaaagatcacagtcactctcacgtacatgatgaagagcacaatcatcacgatcattctcatggtgaagatgcttcacataatcatgaacacaatcatccacatggccatgaacatgattgttcacataatcacgaacaagctcatgttcatagccattcaggaaatcgcgagcatcatcatagaaacttaaaagatatagagaatataataaattctagtgacttaagtgaaaaagttaagagtttaagtttaaatatgtttatgagagtagcagaagcagaagcaaaggtacatggcaaaacattatatgaagtacactttcatgaagtaggcgctattgattcaattgttgatatagtaggagctgctatttgtttagattatttaaaagtcgataaggttatggcatctcatgttcaagttggtggcggattcgtaaaatgtgctcatggtctcatgccagttccagcacctgcgactgtagaaatattaaaaggtattccaataaatgttggagtggttcaatttgaaacaactacgcctacaggagctgcaatactagctgaaaatgttcaagagtttacttcaaaaatagatttttctataaagaaaattggatatggaattggacatagagatctagatatacctaatgttttgagggtttatttaggggaagatagtagattagagaagatagaagaacagtttatattggaaactaatatagatgatatgaacccagaattttatggatatattgaagaaaagctttttgatgcaggagcattagatgtttttaaaactcctatattcatgaaaaaaggaagaccaggaataaaattaagtgtattaattagtgaaaaaatagaaaaagatattttggacatagtttttgaagagacgacctctataggcgtaagaaaatataaagttgaaaaaataatgttaaatagagagttttcaaaggtagaaactcagtatggagaagtaacaatcaagaaatcatattataaaggtaacttagttaaatataagccggaatatgaggaatgtaaaaagattgcaaaagagaataacataactatggaaaaggtgtatagggaagtttataagcaaacttctaatatctataatgaataattctacaatcaaattaagaaaataaaaatgcattggtgagaggcggaagagatagatgattaataatgataaatatagtgaactagtgaaataccttaaaggattaggaaaagtagttttagcattctcagggggagtagatagcacattcttacttagagtagctaaagaagctcttggagaaaatgtaaaggcagtaacgattttatcaccatatattcctaagtgggaaatagcagaggctaaagaattggtaagggaattgggagttcaacatgaaatcattgaagctccaattattgattcaattaaatttaatccagaagatagatgctatctttgtaaaacagctgtattcactatgatattaaatatagcaaaagaacaaggatataactgtgtaattgatgggactaattttgatgacataagtgattatagaccaggtcttaaagcgttaaaagaattagaagtaaaaagtccattattagaatgcaaattaactaaagcagaaataagagcattctctaaagaattgggacttaacacttgggataagccaccttatgcttgccttttgacaaggataccttatgggaatgaactgaaagtagaagattttgaaaagattgaaaatgcagaaaagtatatgatgagtataggttttagagctgttagagtaagatgccacggtgacttagcgagagttgaagtaagtagggatgatagaagtaaattatttaatgaagaacttttagacactattgctgaaaaaataaaagaattcggatttaaatatgtgacattggatttacaaggttatagagtaggaagttttaatgaaactatagtgaaaaaagaatagaatcaaaaatagataataatattttaaagatgaattaaagtggtttaagaagttagcagagaaaatcttaggaggataaagctaatgaacaaagaagaaattaaagaattgttagaaagtgttaaagataacaagttgaatgtagatgaggcacttgaaaagttagaagatctaccttttaaagatttgggtttcgcgaagatagataatcatagagaaattagagttggctatccagaagtaatatactgcgaaggtaagactgtagagcaggttagagatattgtaaaatttatgcttacaaaaaacaataatatattaggaacgagagccaatgaggaaatgtataatgcagttaaagaaatatgtaaagaagcaaaatataataaacttggcagaacaataactattaggagaaatgaacaacctcttacggagaattatatagcaattgttgcagcaggtacttcagatttacctgttgtagaagaagcatttgaaacggctagtatattaggtaatagagttgaaaaaataactgatgttggagttgcagggatacacagacttttttcaaaactggatgtcattaggggagcaaaagttgttatagtaattgcaggtatggaaggtgcgttagcgagcgttgtaggaggtcttgtagataagccggtaatagcagtgccaacaagtgttggatatggtgctaatttcggaggaattgcagctttattatctatgctgaatagttgtgctagcggtgttagcgtagttaatatagataatggcttcggggctgcatataatgctagtattattaataagctgtagttttttacaatgattttatatggttaattgatatttaaaattcagtatctaattgtttagttaggaaagaatagaattaacatcataaatataaaaacaaaagggaggagaattatatgtcaaaacttttttcgaattttaaacttaaaaatttagaatttaaaaatagaattgttatggcacctatgtgtatgtatacagctaaagaagatggaatagccactgaatggcataaaatacattatgctacaagagctttaggcggagtaggacttataatccaagaagcaactggagttgaaagtagaggaagaataagcgatagagatttaggaatatggaatgattcacaaatagatggcttaaagaagatagttgatacatgtaaaagcctaggtgcggttatgggaattcaacttggtcatgcaggtagaaagtgtgaaataaagaatcttgatattataggacctagtgctgaagcatttagtagtgagtataaagttccaaaggaaatgagcaaagaagatatacaggaagtaataaattcatttagaagtgctgctaaaaggtgtattgaaataggatatgatattatagaaatccacggtgctcacggatacttaataaatcaatttttatctcctcttaccaacaaaagaactgatgagtatggaggaaacttagaaaatagagcgcgatttctaaaagaagtagtaaaagcggttagagaagtgtggacaaaagaaaaaccaataatacttaggataagtgccgaagattatttaaatgaaggaaatcatccagaggatttggctaaaataataaatttggttaaagaagaaggaattgatataattaatgtaagctcaggtggcgttgcaccaactcctgttccaattaaggtatatgaaggatatcagataaaatttgcagagataataaaagaaaatacaggacttcctgtaatggctggaggacttattatatcgccttatatggcagaggaaataattcaaaatgatagagcagatatgattttcttaggaagaattcttttaagaaaaccatactggccgcttgaagctgactcaaaattagatggtgaggtaaaatggcctgagcaatatgaaagaggtaagtttaggaataatagataactatactaattggcaataattaattttattaataattatttgaataaattttaattttagagccagcagtataaaatgaatttaaatgtacaccataataatgaggtgatacatatggataataacaaaaacagaataaaagatagacctaaatctaatgcggaacgtagaaaaatagatcctaaaaataatgctgatttaggcattattgatggaaaaaagataggtgcgcctccacataaagaaaaggatcacctataatataaagaggatatatcaaaatgtttttatctgtttgatatatcctttatattttatattaacaagtatatagatagaggaaaattaaattattaattttttataaaagcaattataatagatggtatattacataagcaaaggagactagaaaatgaaactagatttaacaatatttgaattaggaaaacttttaaagaaaatagaggataaatatgatttgaacatattagtgaaattagccttgagtggtggatgggctacaataactggtaatgctaatgttttaaagtatccaaatgattcaaactgtggctgcaatggaaaagacaacattatagatataagtgtagagcgtgatggtaatgagcatggatctgtaataaaaattacaggtgctaaagataaaaagtttgatatagatatatcaagtactagatacaaagaattgcgtccgaataacttaactgttaacaaaataaaaattaatgaaaatgaaagtaaattaagaattgatgaaaatataatatttacaataggcgcgtcagttgatgatataaaagaacttatagaaaactaaatatatatatacaacattagccagcataaaacagtccgaaatacacataatattaaagagtcaataggaagaggagagtgatataaatggacaacagtatgaaaaagaaacatacaagcaaacacaagactttaaatcataatccacaagcagaaagcgtaaaatcagtttttggtgagccaaaagcgaaagattctgaatttactccaagaacttttgactagtagggtagaaattaaacataggcacaattgcagatattatataattgtattgtagaatgattcttggaatataaattatgtaatagacaaaacaatttaatagttaaagaaggaatattttaagtataaagaacttaaaatattccttttttagtgcaaaagaatttaatgttttaaggtataaatttgaaatattattaatttatttaataaatagttattaattagaaatatcaaaatatctatatattagacaggctacaatggaaaacaaaattattatatggatgttatttaataaagttatgaaataacactcactaagtgataaatttgtatggttattgtttaggtttttatttaataggaattaaacagtaagtatttgaaaaaagtagtcataatgtctttgtttaattgaatatattttagttataaaggaggaggagtgtttatgagtatgaactttaaagaatttatagaaacagatagagaaaagtctaacacccaaaagtttgaaggaagttttctagaatatttagatattgttaaggagaatccagaagttgttaatcttgctcataaaagaatctatgaaatgattatgagcaaaggtgtagaggagttaaaaggtgaagaaaaccctcgagtaagaaaaatttatggaaatgatctaataagaaaatatggcttttttaaaaatgatttttacggaattgataaagttataatgaaacttgcaagttattttaaatcagcagccatgaaaggtgaagaatcaaggcaagtattatatcttgttggtccagtaggagcaggtaaatcttcaatagttgagagtttaaaatcggctttagaaagttgtgaaccagtttattcattaaaaggatgcccaatgcatgaagaacctcttcatctaattccaaagcatttaagaccaaaatttgaggaaatgctaggagtacaaatcgaaggagatttatgcccagtatgcaggtataaacttgttaatgaacttaagggagtttatgaagattttccggttgaaagaacaggattttctattagatcaagaaaaggaattggagtagttccacctgttgatcctaataatcaagatacatcaatactaacaggatcaattgatatttctaagatggatatgtattctgaagatgatccaagaattttttctttaaatggagcatttaatgtcggtaaccgtggactagtagaatttatagaggtatttaagaatgatgttgaatatcttcatacaataattactgcaacccaagaaaaatcagtaccatctccgggtaaggggtcaatgatttactttgatggagttatagttgctcactcaaatgaggcagaatggaataaatttaaatcagatcatacaaatgaagcaattttagatagaattgtaaaagttgaagttccatattgtttagaactagatgaagaagttaagatatatgaaaaaatattaaagaagagcaattttaaagcccatatagcaccacatactattgaaatcgcagcgatgtttgcaatactttcaaggttaacaccttcagctaaagtagatgcagttacaaaacttaagatttacaatggagaagagattgttgaaaaaggaactacaaagaagatcgatattggagaacttagagaagaagcaggacaatatgagggcatgaagggaataagtacaagatttatcataaaagcaatagataatgcacttgctgagtcaggatatgattgtataaatccacttagcataatggaaagcataataaaatctgttaaagaactagatatcgcggcagacgataaaaagaaatatttaggctttattcaagataatataagaaaagaatataataaaattcttgaaagagaaattacaaaggcatttatccactcatttagagaacaagctgagagtttatttaacaattatatagataatgctgaggcatatgtaaataagactaagataaaagatgtttcaactggtgaagaacttaatccagatgaagaatttatgagaagcatagaagagcaaataggtgtatatgccgcatcagctaaaggctttagatcagatgtgacttcatatatgttctatatagttagaaagggcggaaaattagattatacttcttatgaacctttgaaggaagcaatagaaaagaaattaacagcttcagttaaagatttatcaagaatcataactaaatcaaaggttagagataaggaacaagcagaaaaatatgattctatggttgaagaaatgaaaagaaatggatattgtcttcattgttgtgatgtaatcttaaagtatgcagctaataacttatggagggactagattagcttatggcaatatttagagattacactaacaatcaaattgatcacgacagatccatagaagatagaagaagacataggcaacttgtagaaaaatcaataaaagaaaatttgggagatatattatcagaagagagtatcgttggagagagtaaaaacaaaaaatttaagataccaattaaaggtattaaggaatatcaattcgtttatggaaagaactctaagggagtagctagtggagtaggcaacgaaaaaagaggagaaaaattagggaatggaaataagaaattagccaaaggaaaccagggagctggaaatgaagagggtgatgatatatatgaaacagaaatcactctcgaggagctaatggactatatatctgaagatctcaacctacctaatttggatcaaaaaaaatattcagaaatagttactgaaactagcggtaagaagagagggtatcaaactcatggaataagaccaagacttgcaaaaaagaaaacagttatgtcaaagatagcaagaaagcaaggaaagaagagagctttaagggaattagaaagtgatgaagagttagatagatttccttttagagaggaagatcttagatactatagagttaaattaaaacctaaaaaagatagtaatgcagtaatgctatttattatggatgcttctggttctatggatgtgactaagaaatatttagcaagatcttacttttttgtgttggcaacttttctaaaaagaaaatataacaatatagcatttgaatttatatatcatactacagttgcaaagagagtagatgaattcgaatttttccataagtctgaatctggtggtacttatatatctagtggcattaatgaggcattaaaggtgattgaagagaagtatcctccggcagcatggaatatatatagcatatacgcaagtgatggagataactggtctgaagataatgaaaaagcagttgcagcggtaaaaaatatatgtgaggttagtaatatgtttggttatgctgaacttttaccatcaacatatacaactacaatgtatcataagtttaaaaaagagataactaatgaaaaatttgttcctgtaattataaaagaaaagaaggacttatgggatgcacttaagattatgcttaggaaggagttaaaggaggaataagaaattggaatatagctttagtgatattgaaaagtggaatgagaaaatagagaaaaaggttaaggaatatgggctagaatgttatcctcaagaattcgaaattataggctttaatgagatgattggatatgaagcttatgttggaatgccttcaagatatccacattggagttttggtaaatcttatgagaaaagtaaaacactttattctttaaatcttactggccttccttatgaaatggttattaattcagatccttgtttagcatatttaatgaaggataatacattattgttacagatattaacaatggcccatgtatatgggcataatgacttcttcagaaataataggttattcaaagagggtactaatgctaaatatactctagaaatgtttaatttagatgctaaaataataagagattatattgatgatccaagtattggatactcggaagttgaaagaatactagatgcaggccatgcgataaggtatcaatctaaaagaaatgttggagttaaagaactaactaacaatgagattaaagaaaatattttaaaagattatgaaagtaaaaaagaaaatagagatattttagatccttatgaagaaattactttaccagatttagataagattccattggagcctgttgatgatctcatgggatttataataaattatggtcagttacaagaatggcagaaaacaatattaagaattgttaagagagaaacagaatattttattcctcaaattgaaactaaaattatgaatgaaggatgggcaagctatacacactataatattttaaaacaattagaattaccacaagaactccatctagagtttttgaaaaggcataatgatgtaatagctcctgctataggcgggttaaatccttattatgttggcttcaaactatttgaagatattgaaaaaagatatggaaaggaaaaaatatttgaagtaagagaaattgaaagagattcttcattcttacggcgttatttaactaaagaattgtgcgaagaattaaatttatttcaatataatcaaagaacttttgatgttgtcattgaagaaatttcagatgatactggctggaaaactattagagatactttgagttatactgcaggtatggggaatataccatatattagagttattgatttgaataagaaaaactatacattgactttagaaaatgtttttgacggaagaccacttgagctttcttatgcaaaagaaacgttgaagtacgttcaagaattatggggacatgatgttaggctaattactaaatcaagcgataagcaagaagtaatcttaacttgtaatcaggaaaagaagataattgtatcctaaaaggtcaggattatgaaaaaataataaacaatactttgtgatttgagtcaataagcatgtttcatcattatgagttaacttatgaggtaaccaaaagtataaaaatgaatagtttatatatgagagaaagtaatattttgggagacaaagatgaacttaaaaggtagtcaaactgaaagaaatttatttaaaacatttgcaggagagtctagagctagaaataagtatactttttatgctgagaaagctagggatgatggtttcctctatgttgcagaggtatttgaagcaactgcaggtaatgaaaaagctcatgcaagagaagtgtttagaagatatttagataggattaataatacaaaaaataatttgatagaatctgcacttagtgaatctgaagaaagtaaagtaatttataaagaatttgaggaaattgctagagaagaaggttttgacgatattgcagacttttataaagaacttcaggaagttgaagaacatcataaggagagatttttagatttagctaaaaaactcaaagaaggtaagatgtttaaatcagatagagaagaagaatggatatgtctaaattgtggttatatatacgaaggtaaggaagcacctatgaaatgcccattatgtagatatccaagagcatattttagaagattatgtaatgaggattgtaagtagggggaaaacatatgatttatgaatatcctgaagaatttgtggttcctgtggtttatgtagagggtttgaaagagaagcctatgaacagaagctattttcagattgataaaagtatgacttctagtgaagagccacaaggagataaaatgtttcagatgatcacgtaccatgatgaagatatttcaaacaaaggaatgatgtttttagatttagatgaagatttgcttcaaaaaccttgccatgaaaaatataagtttgatgatatagttgaaagtgaagaagaacattatagctctaacgatatatttaatgatatagataatgaatatgctgatggtgaaatattaagaatgtaatatattatttgtagttagtcacttattagggattaactacaaatattttattttatgctttagcatgtaagaaaaccacctgctaagcgggtggtgggtgtttggttataccgttaaaaactatgagtattctaaaaaaatgcttttaccacaaactctgtgctaccactaaactaatactgttaatgcgaaactataagttacgaaaaaacttaagtttgataactgcatttaaaatatagaataaccacacaattaaaaaatatatagcaagtctaacagcgagaaaagactgctctatgtattttttagccttacaggcgcagagcaagccacccgtttgacgggtggtcctgactagatagtattaattttttataaaggattaattatgagatttaatgatttggctaaaaaacaatatgaagatatcgataatttaagtgtattattaaagaattatgtagatgtttatagactattaatcgctggagcatcagaactatatggtgtgaatttagcagagaaaagtgaagttaagaaagcactagagagagttgaaaatgtaggtgaattaatagataagttgataagcactttagaacgatgtgaaggttcttatctaaagtattgcaagattagaaatgaatatattacagtaagtacagagaaagataagatatttactgaaatagataatgaattaaattttcaaaactcggaaagagaagaataatgatgaaaactaaacaaaaaaactctatcttgaaattttaggatagagttttttattatggactataattaaaatttttttaacttaagtttacttaccattaagtatgaaccaaggatcatcaaaagaacaacaagataaatcgatggtgtaatattaaaattaaatataatcaatgaaaagaatgccataaagcaacctgctattgttattggcacaccagtaaaagcgccgtcaaaatcagtagtattaaatctagccaatctataggcaccacaaattggaaatagtaataaaactataaatccaaataatcctttaggtccaaaagattcaagattaaataatatatatactaatatagatggtgctactccaaatgaaaccaaatctgctaaagaatctaattctttacctaattcactagaaacgtttaaaaaacgagctattcttccatcatacctatctaccaatcctgctaataaaataaatgcacctgataatgcatacttttcattcattactgataatatagatataattccacaagacaaattaataaaggtaaatacattaggaatacaacttttcctcataaaatcactcctaaaattataaaaaatacttacaaagagttattatagcacataaatgaaaataatataaggtgtaaaattaactttaagtttttattaagattatctagtatcgacattaagtaagtaaaatgatataataaactctatgacaaaggtattataggtattatatgtaaatatttataggaatttaatatatgtatttagagctaattataatcttgtattaagaattattttaaggctattttttatgtatataaataataatttaagaaaatttattggaggtaggttaatttatgaaaaaggttagattcatatacaacccatactcaggagaaaatagtataataagcgaattagacaatattataaaactacaccaagaagtaggattaatagtagtgccatatagaattcaaaaaggtaaagatttagcagaagcattagatataatagatgaaacttatagctatattttaatagctggtggagatggaacagtggattctttagtaaatgctatgaaaaataaaaacataaatatacctataggtatattaccagttggaactgcaaatgactttggaaagtttattaatatgccaaatgatatagaagaagcatgtaagcaaatattaagctcaaagccagtagctgttgacgttggaaaaataaatgagaagtattttataaatgtagcaagctcaggacttttcactgatgtatctcaaaaaactgatgtgaacttaaaaaatacaataggaaagttagcatattatctaaaaggtcttgaagaattacctaactttagaaagttaaagataaaattatcatctaaagaatgtgattatgacggagagatgtatttacttttagtgtttaatggtaaaactgctggaaactttaacttagctacagaagcagaagttacagatggaaaattggacgtaataatatttaaagctatacaaataatagagctaataccactttttataaagcttttgaagggcgagcacttagattcggataaagtggtttattttaaaacagatgatctatatatagaatctccagaagatattgttacagatattgatggagaaagagggcctgatttcccattgagggttcaatgtattaagggtggaattaaacttttaggtataaaatgagctagacagtaataaatataagtaacaggaatatggaatggagcgtaatttgtgaactttgcatattatttatttttgttacttataatttttttgtcaatttcacttataagaaagaatttagaggtttcaccaaagaaaataaaaatatatttggcattagtaattacattatttttattaaggcatgtagcattatttttattgtgtatactcaagaatagtacaataatatattatttaaaaccagtaatatttttgaatcatctatcagtgcctcttatagtgctagctgtaagctatgtttatttaaggtctgaaaaattaaactttggtggaacatatgttattgcagcaacagtatgtattatttatgctgtaataatgcatacttcaaagttgacagttcaggtaaattatttatatggatttatcttacagatagataaggaaactattttatttttgttttctctaatactacttggtgcattactgatactaaatgtaattttattagataggccatacgcaaataaaaaaggaatatggtttataattatagcaatattaatagtaatgatagaggatattattattttaggtggaattaaactcttcccttattcggtaattggcgatatattatttcttataatcataaatttagtattaaagggctttaaaatattgccaaagaacaattatcgttcctaggaaatgaattgagtacgaattcgcgctttagaatatgtaagcagcaggtaatactaagataagttgttataagtatccagagaatttttttgaataagagtaatatgtgctagtggttaatagacagaaaggatacttagttgcaatatcaagcaactaagtatcctttctttttatatggttctttttcttctatttgaataattatcagatgaatgtttatttgagtgctttttattgccattagttgaattcttcttagtattacttatagaaattttttcattagacattttactagcacttgaatttttacttgagttattcctatgactatcatttgatttatgcttaccttgatagcctagttttccaggagtaaaacctattaaacagtttttaccattaccaattagatcttctctatgagctttaagtaaagctttctttactttttgataatttttaggaacagcaaactgtattaaagccctttgcatttctttctcttcaggtgtttttggaatataaactttttctccggtaattgggttaaatccagtataatacattgttgttgataagcttcctggtgttggataaaaatcttgcacttgttcaggggtatatcccatctctttaatgtataatgctaaatctattgctgcatttaggtcagaacctggatgagatgacattaaataaggtactaaaaattgttttttatctatttgtttattaatttgaaaatacttattaacaaatttatcatagacttctcttgttggcttacccatctgattcaatacttttggaactacatgttctggagcaacctttaactgaccactaatatgatgctcacataattctttaaaaaatgcatcatttttatcatgtattaaataatcatatcttagaccagaacgtataaataccttttttattccaggaagttttctaactttctttaatagagaaagatactcagtgtgatctattatcaagtttttacatgggctagggaacatacattgtttatttttgcaagtaccgtgttctatttgtttcttacaagctctatgtctaaaatttgcagtaggacctccaatatcatgaatatatcctttgaagtcaggtaaagtcgttaaaagctttgcttcaccaattattgactcttgccctctattctgaattactctcccttgatgaaatgttagcgcacaaaatgaacatgagccaaaacagcctctatggcttgttatagaaaatttaacttcttgtattgcaggtatgccgcccttttcttcatatatagggtgataggttcttgtgtaaggtaaatcatatgtcatatccatttcttcttgagttaagttttcttgaggtggattctgaactaaatatctatcaccgtattgttgaattatggttctgccgtttatagaatcttgttcgtagtattctaatttataagcttcaccataagcttccttatctgtagatacttcttcaaatgaaggtactataactgcatttttaatattcgatatatctttagtcaaataacaagtcccacgaacacttgttatatttttaatatttgctccatatcttaataactctgcgatttgaacaacggttttttcgcccataccgtacatcaataaatcagctttagaatctacaaggatacttcttctaactttgttatcccaataatcatagtgcgcaaaacgtctaagacttgcttctattcctccaattgcaatagctgcatctttataagcttcacgtattctgttacagtaaacaattattgatctatctggtctgtggccagcctctcctccaggagaatataagtcttcacgtcttgttttctttgcggctgtatagtgattaaccatagaatctatattccctgaattaactaggaaaccatatttaggcttacctaattttttgaaatcctcagaactatgccaattaggttgagctataataccaacattaaaaccttgtgcttcaagagttctgcctataatagcagtaccaaaagaagggtgatctacataagcatcgccagaaacaataataaaatctaattggtcaatttttcttttttttaagtcttctttactaataggtaagaattctttacaaagcttcatataatattaactccaattcttaatttattttatttaaaccacatttatattaaaattacgtatattaaagatcactatatttagatattatactaacgtaataaataattaaaaaatcaaatgaacaagcttttaaagcttattcttaaagtatattaacataacaataattagtttacaaacaatatcaatagtcaagggtagtgtaaattcaaagcaacttataaaggaatatttataatttacagattgaggagtaattaatgaaatttgtatttgaattaaaagataaattaaaaataaaaatttattgcctttttacttctatgtaatataataattagagatagtagtaaattataactaagtgaagatatacagggcggtgtaaaagatggaggaaggacctcagaatataaactataatatagcaaaaactaaatatatttcagaaggaaaatcttttatcttgccttaaaagatataagtagatgtagtttagttacaatactaatttcacttaaggattttccttctgcagaagtagggggaataattaagatggaattatctatatttctatatactaacattttagataaaaaagtttatgacgagtttggtgatgttttaggaactctaagagatatttatgtgactacagaggatggatatcctagaataattgggtataagcttaaaaaggacggagtagcctttcattatgagtttagatatatagaatttttaaatagggatggtaaaattaagattacaacaagaggaagtaaagaaatattaccgatgaggtatagttatcttctttcagaaaatctattagataaaaagatagttgatataaatggaaaacaagttgtaagggttaatgatttgagaatcgcaaaaattgcaggagaatacagagttattggagttgaaacagggaaattagcgagatacagaagactaaaaatagctggtattatgaaattcatatacgggattatgagaaagaagttagaagacaaagttttaagatgggatgatgttgagtccttggaaatggttgaaaataatttgaaattatccataccatataaaaaattgtcaactctacatccagcggaccttgcagatatattagaaaatctagatacaaactcaagaaaacaagtattggaatcactggatgaggatttagcagccgatacattagaggaaatagattcagaatataaggggacaataattaaggaattatctgacagcaaaactgtagaagtgctagaaaatatgcctaacgatgagatagcagatttgttagatgatttagatgaagaagaaagagaaaaaatattagtaaatttagaaaaagaagatgcagatgaagttaaggaattgttgcaatatgaggatgaaactgttggtagtataatgagtaaagaatttatatctgttaatctagatattacagttggagatactattgagatattaaaagaaacaaaaccagatgaagaagttatttattatatttatataacagatgaagaagaacgtgttcaaggtgtggtatctttaagagacttaatagttaatgataatgatttaaagataagagaaataatggactattctgtatcacgtgtaaagcatgatgatgaaattagcgaagctatagaagttgcctcaaaatatgatttgaattcagtgccagtagtagatgaatatgaaaaattaattggaatagtaattattcatgatttgatagatgaatttttgtatcctctttggaagaagaaaaattagaatataaaatatttagatttttaataaaaagaatgttttatttatattatttacctgtaaggattacttatttttatatatttaagaaagtcaatactttttgattaaaattttaaaaagtattgactttttttttagaaagaatataattataatataaaacctatcaaaacactaagaattaaaaactgtgaaaaagaaaagtagcataaaggaagtttacagagagaaaaggatgctgagaactttttatctagaatttatgtgaagtgctctttggagttgaaatttgaaatcaaatatattaaagaaatggagtgatagtatatccattgatttttttgatatattttttagtatgattttccgggatcacccgttatagtgatatgatatcttaagtatcaaaattgagagggattagttatttaatccaattagagtggaaccgcgaattttacttcgtctctataattttttatggaggatgaagtttttttattatatttaatataaaatgaatgtaaaaagatatactaaaattagtagaaatttgaggaggagaataataatatggtttataatggaggattagagttaataggaaatacacctattttaaaaattaataacttaattaaggacgaaaatagtgcagatatatacgtaaaacttgaaaaatttaatccgggtggaagcgttaaagacagagcagcattaggaatgattgagagagctgaaagggaaggagtattaaagcccggggcaacaatagtagagcctacaagcggaaatacaggaatcgcactcgcacttataggaaaattgaaaggttatagtgtaacaatagtaatgccagaaacaatgagtaaggaaagaagagatcttataaaagcatacggtgcaaatctagtattgactgaaggatctaaggggatgaaaggagctatagaaaaggctcttgaaataggaagtggagaaggattttttatccctcaacaatttgagaatatagctaatccagaaaagcactatgaaacaacagcagaagaaatatataaagacattccagatttagatgcctttgttgcaggcgttggaagtggtggaactgtaataggagtatctaaaaatttaaaaaagaaaaattcggatattaaagcatttgcagttgaaccagcaaattcaccagttttaagcggtgggaatccaggtggtcataaaatccaaggtataggagcaggatttgttccaggagtttatgataaagaatatgtagatgaaatactacaagtaagagatgaagatgcatttaaaacagcaaaagcatttgctgaaaatgaaggtgtattgattggaatatcttcaggtgcggctgtatatgcagcaatacaggttgcaaaaagacttggaaaaggtaaaaaggtattggctatagctccagatgggggagaaaagtatatatctatgggattatatgattaattaatttaactataaaagttttattaatcatcatcgattaacagtgaaacaattgatttaacttaagatactaatgaagttctattaataattgcatatgtgaaaagctctactgaaaactatagaaaggagaataggctgtgtttaaaaaattaaattacgatttagaaagagttttaagtgaagatccagcagctaaaagtaaactagaagtattattattgtacccatgtattcatgcactaatatcatatagaattgcacatgccctatatttaaagaaatggtttttcttggcaagattaatttctcaattatctaggtttttaacaggtatagaaattcatccgggagctaagataggaaaagggttgtttatagaccacggaatgggagtagttataggtgagactgcagaagtaggagacaatgttacgctttatcatggtgtaactctaggtggtacaggcaaggatgtagggaaaagacacccaactatcgaggatgacgttttaataggcactggtgcaaaggtacttggacctataattgttgggaagggtgctaagataggagctaatgctgtagttgtaaagaatgtaccagcaagggcaacagcaataggagttcaagctaaaaatattgttagaaatagtgcaagtgcagcaataattgaaatcagtgatttaaaaggacgcaaaaagaaaatatttaacgatatggttatttaatgctttagaatatggaagtatatgaagtacaattagtataaattcgtatcttgtatagttcagtagcatttatttataggattttactaagttaagatgttttactaaatattaaaatacaacatttctttactaattatgttataaagaaatggattataatctaaaaattatgagatgcattaattaaactttagagcaagaaagtttagttaatgtatttttttatatggagattctgctaaagctaaataagttatattaatttatcttggttataagtaaaatgttttttgcaaataagttagaataataaaagaggatattagtataattggtatgaaatcttacaataaccttaatatttttggtaattgcatagacatatgaaagcatatataatgtatataaataatgatcaataatatattatgcatgtaatacttgtatagaattgaataattgtaataaaatgtaattagtagtataatataaaatgtgattattaagaaaggttggagaaaaatgttatcaccagttgcaataaaattaataagaatgatgccagaagggataattataaaaatagcaaaaaaaatagtggataattatataagaaaatatgctaacataactgttaatggagcagataatatagataaagtaaaaaaaccaagaatatttgtatgcaatcacttgagtaattcggacggattagttttatcaaaaatgctaaaagagaaaagtgatccacattttgtaatgggaataaaattgtcagaagatccaataacaaaattaggaactcagatagtgaaaaacataccaattaaacctaattctgctgataaggaagctattacaagagttgttaaaactcttaaagaaggaaatgatattttaatatttcctgaaggtactaggagtaggacaggtgctatgatagaaggtaaaaagggaattctgttatttgcaagaatggcaaaagcggaaataattccaattggtatgtctggaacagataagttattacctataagtaaaagtggagatatgggagcagagaaatggcagcatgctgacgttactataaatataggtgaaaaaattgtatttcctgctaaagagaaggatgaagacaaacatgaatatgataataaatgtatggatatcctaatgaggagcatagcgagtctcttaccagaaaggtatagaggaatttataagtaaggagattacaaaagatatgaaagcaaggacaaaaaaaattgtagatatattgaaagagacatatccagatgcaaagtgtgaattgaattatgaaacaccactccaattacttatagctacaatattgtctgctcaaacaacagataaaaaagtgaacgaggtaacaaaagatctatttagagattatccagatctagattctcttttaacattaacaaacgaggaacttgaagaaaggataaagcagataggtttatatagaaataaatccaagaatttaatacttatgttcaatcaacttaaggaaaaatttaatggagaagtcccaaagacaatggaggaaataacttcacttgctggagcgggaagaaaaacagctaatgtagttttatcaaatgcctttaatgtgccatctattgctgtagatacacatgtttttagagtatcaaatagattaaaacttgcagattcagaaaatgttttagaagttgaaaaacaattacaaaaagaactaccaaagaaagagtggactcttatgcatcatctacttatatttcatggaagaagatgttgtagtgctagaaatcctaagtgtggggaatgtccaataaaggatttatgtagttatgataataaaactaacagataaaagaatatttataaaattttcatgaaccacaattaagacaatttatagtcaaagtggttcttttaattgtgccgttaatttaataaaataaagataagttagaatgaataaatttaattaacaggaaatattaataagtattttggaggtaatctatgaaaattggagttataatgggtggtatatcatcagaaagagagatatcattgcaaagtggaaaatctataattgaaaatataaacaaggaaaagtatgaagtgctaccaattgtaatagataaaaaagaagatataataaataaatctaaagggatagatttcgcacttttagctttacatggtcaatttggagaggatggaacagttcaatcagtgcttcaaacactaggtataccatattcagggtgtgggcctttaagtagtgctatgtgcatggataaagacgtatcaaaatccgttttagaggcaaatgggattaggactgctccttggattaacctaagaaaaggtgataatatagatttcaataaaataaatgaattaggatatccagttgtagtaaaacctactcatggtggatcaagtgttgcaacattcatagttaaagaagagaaggaaattgaaaactgtgtttcagaagcttttaaatgggatagcgaagttatgatagaaaaatttataaaaggtgatgaaataacttgccctgtatataataataaaatgcttccagtaattgcaattaagcctaaggctgaattctttgactttacatctaaatatcaagatggaggggcagaagaaatagtagttgagctagaagcagagttacacaaggaagtagaaaagatggcgttagaaacttataaagcacttaaatgcgaagtgtattctagagttgatatgatagttacagaggaaggcgtaccatacattttagaaataaatactcttccaggaatgactaaaaatagcctaattcctaaaagtgcagcagctttgaatataggattttcagaactgatagatatgatcatacaggattcgttgaaaataagcagatagtatatgaattataaaactttttaaatatttataacattaaaattgaaaaactacttgtttaagaataccttagacaagtagtttttatcataatttctattgaaaacaatctgcaaatcttccagtaaaaccttttagaaaatataacttatattaagacaacttagttattgtttctttttgcaatctttacaaacgcccttcataaccaagtcatgatctgttaaagtgaagccagtcgcattttgaactaattcttgaatctgaagcataggacaagggatttcaacttctttgtgacatatatcacattccaaatgatgcctatgagtttttccttttagcttatatgaaaagactccatcatttagagttattttttcaataatttctttttcttcaaataattctaaagttctataaaccgtgctcaaatttatatttatattgttgcttttataaatctgatatattttttcagctgacaaactgttttcagaattttttaatatacttaggatttctgttcttcctttagttattttaattcctttatttttaagaatttcctttggttccattttcatatcccctaacagctaaatattaaatatattatatcacatatatttaatatcttaaaaaaatatcatcttaaaaccaaaaaatataagagctatcccgccaaaaaagttagcatacgttgtaacaaattttatttttttaatgtatctgcacataaaaaatcctactgtacatgtaaataaagttattaatccaataaaaattgaatcaacacaaagtagtagattgtatgaaatctcatgaaatgcagtgaatcctataactagtgcatctatactaacggatattccaagtattaaacaagtactattttttattaaaatttcagtttctttttccttaaagccatctattattataagagttcctactattgccataattattccaccagcaatggaagggatgcatgtaatataagtatcaaataaatatcctaaacttccacctacatatgtaaatagaaactgaaagaatgcaaatgataataaaaactttattttatggattctattaattctaggatttagaccgattcctaatgttacgccaaaagcatccatggccagtgcaattcctattattataatgtcgtacaaattcattttctcttcctcctttaaaattagacttactctataataattaaagtttttttaatatatgcaaaaatttaaaaaaaagtctttattaaatcttttttttgttgtatattaataaatagtgtattactattggctaaatagtatagcatatttaaccaaattagtatagcaaacaaggaggaaatttcatgtcaaattgtataatagctcaatctggggggccaacagcagtaattaattcaagtgtagtaggacttttaaatgcgaataaagaactaaagacttttgaaaaagtttatggaggcctaaatggtattgagggtatattaaatagaaatataattgatttgtcatcagtttcagaaaatgaaatagataattttagatttactccatcttcaggacttggatcttgtaggtataaattaaaagatttagattcttgtagtgaagaatatgaaagtttaatagaaatacttagagaatatgatataacatcattcttttatgttggtggaaatgattctatggataccatagcaaagctttcacgatatgcaaaacaaaatgatattggaataagttttataggtatacctaaaactattgataatgatttaaaattcactgatcacactccaggctttggcagtgcagcaaaattcattggaacaacagcgcttgaaacatatttagatgcatcagtttacataaataacggtatatttattttagaaacgatgggaagagatacaggatggcttgcagcttctgcatgtattgcaaagcttgatggaaagccaattgcagattttatatatcttcctgaagcagcgtttgataaaatcaaatttttgaatgatgttaggcaaagatttgaagaacaaaataaagtgtatataattgtatcagaaggaataagagataaagatggaagattcatttctgaatttgattgtgtttctcaagataaatttggacacgttcaattaggaggggtatctgaatacttgagaaggctaattcttgatgctggatttacaacaagggtaaaagcactacaacttggggttcttcaacgttgtgcaatgcattgtgcttcagacactgatttgacagaagcgtataatgctggaaagatggctttacaatatgcttcacaaggagaatcagggaaaatggttagcattaacaggttatctaatgagccttatgaagttaattacccattagttaatgcagaagatgtagcaaataatgttaagtatttccctatagaatggattaataaagaaggtaattttgtaacacctgaagcatgctcatattttgagccattaatcaaagatgctcctaatttagagtttgagagaaatcttccaaaatataaggtgtttaatcaatagataataagtataaaatcataagcttagatgttttaatatttaactaatagaaggatgtatatatgaagaatttcatttatacatcctataaattaatagaattttcaatagtataataaattttattgtactatttatttttagttctaaataaagaaaatttgttattttatttttcgtaaagagatatcttctaatacatttaaaaaggtatcaacttcttcaattgaattatataatgcaaaacttactcgtatcattcctaacatttttttatctggattatcaaggaattctttagcttcatcttcacttacgttcatgagtcttctacaatatggatgggaacaaaaccagccatgtcttacagaaattcctttctttttagccaagatatcagctacatcatgatgatacatatcctctatattaaaggtggcaattccaagcctatcactgatgttttcagtatctccatagtttataattttagggattttcttaagtccttctatagtgtgctctaaaagaagtctttcatgtttttctatatagtcgtatccaatggtattaataactcgtaatgaattaactaagctcattacacccaaaaaatttggtgttcctgcttcattcttctctggtggggtaagaaacttaacctctctatccattactaactcaacagttccaccacctaaataatctggatctgcatccatgaaatcctcttttaatcctattatgactcctacaccaaagggagaataaattttgtgcgacgaaaataccaagaaatcaatttgatcatcatctgtgtccccgctaatattaactcttgtgtgtggtacaagttgtgcaccatctacaatcaatttggcaccatatttatgaactagttttgctataaaatgaatatgatttatataaccagttacattagaagctccagtaagagatacatattttattttaccattgcttttctttagtttctcttccaactcttcaagtttgagcctgccttgttgatctacgtcgatataatcgacgttacctctttttcgccaaggcaaatcatttgaatgatgctccattctagaggttaatactatttcgtctggagttttagtaagagtttttgctaatttgtttataccttcagttgtattactaacatatattgcaacatatttatctttatcttttacattgaaaaaatccagtaaaaaatttttagattctttatataaattggtagttatttcagctttttgacctgttcctcgtcctatagaagcataagtattgctcaattgttttatatactcaatacttgacttaataggcggagttgtagctgcattatcaaaatttattccatctatacaatttccatctgaatcacacactttttcatctaatccaacaaataagtctttaatgttttccttattttctatcttcatatgcatctcctccaatatatattattcctataatatatttattgttcgcttaagagggctgtaaaattcatatctttttctttccattttgtactatatataattgttatgcatattaattaagagaagcaaatattatttatttttaggaggtagtttaaaatgaaccctgataagaagtatatgtctcaagtcagctcgagtgataatgatattagatttgttccaccagcatttatgagtacaaatatctacgaaaaagtttcgtttggtattgatgataataatcgtaatttagatttatttccttctgaaacaggcatgcctgaattatgttattattccgataatcaaaatgaaggaattagtagtggtttcaattttaataacatagctaataatgaaatacctactacttttgatgcactaagaggtcttgatttagatttaaatgaagaagatcttgaaagaaataattcagataatgatgtgaataaaatttatgctagaattgaaagaagacatccaggaatattcgcgactctttattcatatagaattcctcgtccgataattagagtaattatcaaaaggttgataaaacttacattagcatattgtgataaaaataataactattaataaccagtttaacatacaaaaatatcttgaagatttacaactactataatgtaaaatctttaagatatttctttacatagcttttaaaaataggtttcaatatatatgagttacacgcttatcatagctaaaatttttttaaaaagtattggttttatgctttcgatatctgtgggttctttcaatattacagtagtaaaacatatgctgccaactaattcaaaaatcataaataatgtcatttcagcttcttcttcgttcattcccgatttagttaggttcttaacaaaaatatctaggactttctttacatcattatatgcttctggtttcattattgcttttctataaagtccccatgaaatattcttattaattagctttaacagagaaacattatcttttaaataatttattatataatcaataaagaatagtgtgcgttctttaaaatctttgcttcccaaagcatttgttttagctaatccttctcgtattatttcattacttttttgaagaattaatttatttaagatatcatatttatcactgaaatatagataaaaagtcccttttgctactcttgcattcttagttatatcatcgatcgaagttttttctatgccatttttaagaaataaatcatatgctgctaaaaataactcttcctcttttaattgttttttattctgggtaagagatttattgttattctttaaagtcatattttgcctccaaattacgtgtttaacttattataaagcaaattaaataataatccaaattttacatagagataataaaaaaattatcaattaactcttaatatagttaaattgatataacaccgataagatagtataatttagtagagaaaatttagttaagctattaatccattttatataggatttacgttttaatattaaattaaacctttatagtttaaattctggattttcgtatgaaatactggaggataaaaaatgattgtattaagttgtaaaaatatatgtaaaagttatggtataaatactattttgaaagatgtaacattttcaataaatgaaggagataaggttggtataattggatcaaacggagaagggaaaacaaccttgtttaagatattatcaaaagaaattacgcaagatgatggagaagtctttatagataaaaataagtctttgggttatcttgctcaacatttagcattagattcatgcaacacaatttatgatgaaatgcttattgtttttgaagatctccaaaggttagaacggaagattacagagttagaagctaagatgaatgaaccgtatgatgaaaataatgcttcatatcatgagaaaattataaaagactatggaactgcccaagatctgtatcaaaacagaggcggatatacatataaaggagaaatatcgcgagttcttaaaggattaggatttacagaagatgactttgataaactaatttcaactttaagcggagggcagaaaactagagtcgcactttgtaagctattacttttaaatcctgatatattattgcttgatgagcctacgaatcacttggatttggaagcaattgaatggcttgaagaatatttaaaaacttataaaggaactgtaattgtaatttcccatgatagatttttcttggattctgtaacaacagcaacatttcaggttataaatggtcatgtgaattgctataatgctccatatacaaagtctttagaacttatgaagaaagattatgaggctaaattaaaagcttataatttacaacagacggaaataaaaagacaagaagcaataatagaaaaatttaggtcatttaatagagagaaaagtataaaggcagctgaaagtagagaaaaggcacttgataaaatggaaattgtagatgctcctgataaagaaaaaactgcatctaagattaaatttgaagcttctgttaaaagtggatatgatgtgcttcatgttgaaaaactggctaaaagctatggagaaaagaaattattcgataatttatcttttgatttaaaaagaggagaaaagattgcgttaataggtgaaaatggacggggtaaaaccacactttttaatataataatggataaagttaagagtgattcaggagttaaggttttaggagtaaatgttaatgtaggatattatgatcaggaacaatctaatcttgatcctaataagacaatattaaatgaagtatgggatgactttccagagttaactacaagtgaacttagaggatttcttggatcatttctttttagaggcgatgatgtatttaaagaaataaacaagttgagtggaggagaaagatgtagaataaatctcctaaaattgatgttatctaaatcaaacttacttctattagatgaacctacaaatcatttggatattccttcaagagaggcccttgaagaggcaattttaagctatgatggtacattaattgtaatttcccatgatagatatttcttaaataaagtaattaatagaatattagaattagaagagcatggagtcaatgaatatcttggaaattatagctactatactgaaaagaagaagaatccacaaagatttgagacatatgaagggttggcatctggaaagacaaaaacgcaattaaatgaagaaaagaaaaagaaaaaggctttagagaaagaagctaaggctaagcaaaatgaaattaagaatatagaaactaatataactcaaaatgaggaagctcttgaaaaattgcaggaggaactttgtaaagaagaagtttattctaatccagttgaaagtgaaagagtaaataaagaaattaaaaatcttcaagaaactattgaaaaattatatgaacaatgggaagagatttctagttaatttaacatgatatagattaataagttataaaaaagaaaactggaaagagacgattaacagtataaataaaggcatgttttgtatatggtgtaaatataagcttaattacagtttattaagcttcatcaactataacaatacatgccttttattagaaaattatttatgtatcatatgtgtacataaggaatattttgtattttaatttcttttaatatttatacatcagagtatgtatggacatattttagaaaatattaagaactactagtaaatttttttaagatatttaagttagaatgaaattataatagaattcagatataaaatttttagattggagatgggatgtttggaaaaaggaactattctaattgtggatgatgaaaaggaaatacgagatttagtcgatatatatcttaagagcgatgggtttaataccataagcgcatgcgatggtttagaagctattaatttagttaaagataatgatatagatttaataatattagatgtcatgatgcctaatttaaatggaatagagacttgtttaaagattagagagattaaagaaatgcctataataatgttatcagctaaaagtgaggatattgataagatattaggccttaatatgggagcggatgattatttaacgaaaccattcaatccattagagttagttgcaagagtaaagtcacaacttagaagatttcatatgtttggtaagaacgcaaatttgctagaagtagaagaagaaaatataatacaaatagaggatcttacaataaatctagaaacacatgaagtatcgttaggcgataatatagtaagacttacgccaacagaatttgatatattatcgttattagctcaaagtcgaggaaaagtattttcaatagaaaatatttatgagagcgtttggaatcaggaattcatgacttcagataacactgtcatggttcatataagaaaaataagagagaagatagaggaaaatccaagaaatcctagatttataaagactgtttggggggtaggatataaaattgaaaaataaagatcttggaaggcatagaatttttagcaatgatatttcaaatttaaagttaatacagtatattgaaaaaataatacgaagtataaaaaaaagaattgagaaaaatataagatttgagcttatgatggttataggaatatgctttttagttgcatttatcttctatagtttttctaataatcttttcaagagagagcatactgaacctcagataaaatatgattatgattctattgagaggtctgcaaatgatttagctaaacaaatagagtctcaagaaaatttaaaattagaagataaagataagattaatggcattttagaaaatgtatcagatggagaggaaagttatataacagatttagatggaaaggtgttatataagactaaaaacgttgcagaggaaaacatagatatttatagtgcactaaaaagtgcaatgacaaatgtaaatagtgaagggattagcgaaccaagagaaaaaagctatataatgccactaaagataggttcggatagagtttacttaatttattcaaagattccagaggcaaggataacatacaatacaattagcacatcaaattcatctttagcactaattctcacagttatagtttttatagttctatttgttgtgataactaataataagatgaaatacttggatgagattgcagttggccttaagataatagcaagtggaaacttgaattataggatagaagagaaaggtacggatgaaattaaaaatatagcctataatataaatcaaatggctaaggaaattggagagaaaattagtgctgagagagatgcagaaaagacaaaagcagatttaataacgaatgtttctcacgatttaagaacaccattaacatctgtaatggggtacatagggcttgttattcagaacaggtataaagatgaaaaagaaatggaggaatacttaaacatagcattcaataaggctgaaagattaaaattactaattgatgatttatttgagtatactaaactaaataatagcggaataacactaacaaagactaaagttaatctagcagaatttctatcacaattaatagaagaattgacgccgttacttgatcaaaataaattaacaatatataaaaaattcgaatctgaaaaaatctcagtttctatagatacactgaagatgcttagagtgtttgagaatataataacaaatgcaataaaatattcatataaaccaggagaaatattaataggattatatgagaaagatggtaaagccattgtagtttttagaaataaaggtgatcatctttctaaagaaaaaagtgaaaaattatttgatagattttatagactggatgaatctaggaataccaatacaggagggtcaggtcttggattagctatttctaagaatatagtagaattgcatgacggcaaaatatgggccgaatcagtaggaaataatataagtttttacgtgcaactaaacctataattaattactaaattataggtactttttttgttgtaaattaatatttatattagagaagtattttttatatggaggaaatatgcaaaacaaaaatcctaacagtcgttttggtgtagacataaatgaatatactcaaaatgttcagttcaatatactagcaactaaagtagattttttgtatttaagagcctctggttctgctacaggaagatttagggtagataggaaatttgtaaattttgcagccgatagtagaaattatggaattcctgttggtgcatatcattttggagttccgtcttatgatctaactgatgcagacaggcaatgtgatgactttataaatacgctgcaagaaggttttggaactaatgattacggagatttgtttccagtattggatgtagaagtacctgtaaataaatcaataactactacaacattgattaattggattgatagatttaggaaaaggtttgagagaaagactagaagaagacttatgctttatacaggaacattttttatagagctatataataatttttatattcctggacgtggatatccattaaaaaatatgccactatggattgctatgtatttagcgattcctaccaacccaagaataccacctgatgttggaggatggacaagatggaggatatggcaatatagtgaaagtgctaatgtagaaggaattgggaatcctgttgatgcaaattggggaccggataatgtagatttattaaggcagcctcgtgttgttactggattaaaggcagcgtaccagaataggaacataaatgtttcttggaatagaaatcctgatgtagatttattgggatataacatttttgtaaatagagaatgggttggaaccgttgatgaaaatgctacaagttacttaataactagtaataaggtaaatactcagaagaatgcaccagtagaagtatcaattgaagcttttgattatgatggagaaacttcaaaaactcgtgcaaaagtaaatctataataaatagtatcgtatttcagcttatatgggaatataatcatatttctattgatagttggaatatgatataatgaaaacattgatgacaatttgaaaaatatgtaaattgccatcaataaatgcacttaaaataaatattaagcatagaagatgtataatatttaattccttgaaaggagaataggggagtggaaaaacgcaccggcaaaagagcaaaagcttctaaagacaattataataaaaagaagaaaattatgctcgcaatatttacattaattgtagtaggagctgctgcactaattgcatactcaatagctataaaaggtatagttaaggagtgggatgataaaatatatccgggagtaactgtacaagaagtaaatattggaggaatgactaaagaagaagctaaaaataagcttaccgaaacatttgcgacatctatagaaaataaaaagttgcctatcaaaatagaggacaaacaatatgaacttatttactctgatattaatcctaaatatgatatagatgcaactgtggaagaggcttataaacttgggaaaaaagatggggttttaagcagatatataagtataaagagtaataatagtaagagcaaggaggttccaatcgcattttcttataatgaagaaaagttgaaggagtacgaggaaaaacttcagatagctgttaatcaatctgctaaagatgcaacaattagtatacaaaagaatgatattatagttaaaccagagatagaaggaaagacagttaatttagatacattagatcagaagttaaaagaaaatataaatggaaatattaattctgataattcagtatcaattgatttggaagtaacaaaacctaaaataactcaagaagatctgtccaagataaaaggagtaatggggactttttcatcaaattattccacatcgccggaagggagatgtaataacatagaaatagctacttcagcaataaacggaacaatagttatgccaggagaaatatttagttttaatgacgttgttggacctagaacagctgaaaggggttataaggaagctggaacatatgttggaaataaaatagagcctggaattggtggtggaatatgtcaagtatcgaccactatttatagagctgcgatgaaagcaaatctaaggtctattgaaagaacaaatcattccatggctgttggttatgcgcaacctggacttgatgccactgtgtcatatggatatttagattataagtttaaaaacacatatgattttcctatatatattcaagggagtacgtcaggtaaagtagtaacttatagtatatatggagaccctagtgctttaaatggaagaacatatgatatggcaagtgaaattcttgaaacaataccaccagaaacaaaagtggtggatgatagcagtttgccagtaggacaagaagtaacagagggagcagcaatgactggttatagagcaagagcatatcagattacttatgaaaatggttctgaagtgaatagagaagtagtatcaacagatacttatgcaagtgtaggaatagtagttaaaaaaggaactcaacctgtaaatgcgactcaacagccagaaacagcagcggagccgccagcaactcagccaacagcagaaccacctgtagctcaaccaacgcaataggtcaaaatttaatatttataaaaaactcaaagcatattttctttaggaattattaagattaattaaagaaaatatgcttaagttttattaaggttaaaacaacttcaatatattgaataattcaccaattggaatgcgtaataatatacctttaatattgaaaaatttttccattgttatgtaattattaattttgacttgttatgaaccatatagtataattttaaattaaagtgaattaatttttgtataaaataggagaaggtgacgttttgaatttaaatatagtattatatgaacctgagatacctcagaatactggaaatattgcaagaacttgtgttttaacaggcagtaagttgcatttaataaaacctcttgggttcgaaataaatgaaaagcaagtgagaagagcaggtttagattattggaaggatttagatctagaaatacatgatagctatgaagaattcttgaaaaaatatggtgataaaacaatatatttatcaactacacacggagaaacgcattttgatgaaatttccttcaaagaaggggattttataatgtttggaagagaatctagtggagttcctgaagaagtgcataataggcatattggatttagggttccaatgataaaatcaagtactagaagtttaaatttatctaatacagtagctatagtagcttatgaagctttaaggcagataggatttcctaatatgaaataattgaagaggaatgaagatatatggaaaagataaaaattataacagatagcactgctgatttgccaaaagaaatatatgagaaatacgatatagaagttttgccattattgataaactttggtgaagaaagttatctagatggagttgagataaatactaatgaagtctttgaaagaattagaaatgaaaatatacttccaactacagctcaagttactccgaatagattcgttgaaatctataagaagtacttagcggaaggatataaaattatatcaattcatatgtcttctgtaatgagtggaacatatcaatcggcatgtattgctaaggaaatgctggaaagccaagatataatagttgttgattctcagaatgtaacagcggctttaggaatacttgtattaaaagctgttaagctcatagaaaagggttataacatttcagaagtagaagaaaatttaaatagcattagaaataaagttaagctttcagtttactttgattctttagagtacctagtgagaggcggaaggatttcaaaaactgctggcatggttggtggcatgcttggaataaagttaatacttgaaataaaagatggcataatgtcagttaaagataaaattagaggaaataaaaaggcgattaagaaaattattagtgatttagaaaacgcgacgttagatgatgaagtgcctgtaatattgattgacgtaaataatattgaagtaaaagaagcacttagaacatatatgaatgataataacgttaactttattgaatgtcaggttggatcaactgtatgtatacattctggacctggatgctgtggattggtttttttaaataaataattttaattaataaataaaaaaacatgcttttagctattacttatattttaacatggttgatataagtagtatataagcatgtttttatatttattgtactagatatgatttacatagttacatatagtggacttgcaatatttacagaataggaggtatactaatagaaagagagattacttcaataaatttaatgaatacgtttaattaaaaataatttatataaattataaggaggaaacttatgaatttggattataacatgaagatgacccaggaacagagattagtactcactcaaaatatgcaacaatccataaagctcttacaaatgtctcttcatgatttgagagaatatattgacaatgagtattcagaaaatccagtgttagaggttaacgaggaaataagctcatatgatgatgaacagataaacagagacgttaatatagaagacaaatacgatcataaaaaattagttgaagaattatattctgataattacaaggatagatcagaaacaaattattctaatgaagaagtttcgccattaaatttcattgagaagaaagtatcactaaaagaatatttacaagaacaactaattgaagctgatgtaaatcaatatatgttagatatatgtaattatatcgttgaatcattagattatagagggtatttggaaatatcgacacgagaacttgcagaagaattgaatatatctgaggagatagttaataaggcattagaagtggtacaggcattggaaccatatggaataggtgctaggaatatcaaagagtgcttgcttattcagagtctaaaattaaatattttagatgatacgatagaaaaaataattttaaatcatttagaaaatattgcagaaaacaaatatgaagttgtagcgaaggacctcaatataaatccaagagaagctcaaagatatggtgatttaataaagaagctagaacctaaaccatcaagaggcttttatacaggagaagaggttaattatataattcctgatgctgaaataaagaatgttgatggtgaatttttcattttgatgaatgaaagtgttttgccaagacttatgataaataaaacatatagagatgttttaagaaataatcaagattctgaaacaaacacttatgttaaagaaaaaattaatcaggcacttttcttaattaagtcaatagagcaaaggaaaaatacattatataaggtgttagaatgtgttgttgaaaagcaaaatgatttctttaagtttggaagacagtatataaaacctttgacactaaaagaagttgcagaaataatcaatcttcatgaatctaccgtaagtagagcaattaaagataaatatgttttaacaagttatggaacaattaaaataaaagatttatttgcaagtgggttatcttcaaacaataacgaagatatggcaacttcaaaaataaaaaatgaaataaagaaaataatagaagaagagaataaaagtaagcctttgtcagatcaattaataagttctatgttagtagaaaaaaatatgaatatatctagaagaactgtcgcaaaatatagagaggaattaggtattaaatcatcttcagcaaggaagagattataaagattccatgaaataattagctttagattttaatattaaattcaattgtcaatattcaattacagtttaagaacatctcaactttaattataggaatatataaagttcatgattatcttttctgtaattgaaattgacagttgataaaatgattcttgaattcaaaaatactatttcacatagctattattaagcgtaataatattaaatatgaaatgctgcataaaactagaaaaaagtttgctaataatttattttgttagggtttttttgttttttttgaaatattataaaaaaagttttcctaaagactttaaaatttcaaaaaggtgttttataataatagatgtgggacgtaatgaaatgatatgggacacgtagtgaccaaaggagtgtttgagttgcaggaaatattagaattacaaaagaagatagttcctgagcttgtaaatacattggagaaaaggtataacgtactcagaacaatctttcataatcaacctataggacgaagagtactcgctgatatgctaaatgtcggtgaaagaacagttagaacagaaataggttttttaaaagaacaaggtttaattgagataaatacttctggaatgacagttacaagtgaaggcgtagagattatacacaaactaaatgatttcattcatgaaataaaaggtctttcagaagttgaaaagaaaatacaatcttctcttaacttaaaaaaagtaatcatagtcccaggagatgtagaagaaaatcctttggttttaaaggatttgggaaaagcatgtgctaattatgttaaagatgtgctaaaagataattctattatagcattaacaggagggagcactttaaaagaagttgtagaagcttttccaagagtaacaaatttatcacagatacaagtagtaccagcaagaggaggaatggggaaaaaagttgaaacccaagctaatacattagcagccactttagcaaagaaattaaacggtacttataagatgcttcatatctcggaaaatttgagcttagatataataggcaccttgcttaaagaagaggcagtaaaagttgttatagatactatacataaggcagatgtactaatttatggtataggtaacgcggtgcagatggctagaaaaagaggtgtaccacagcaagaaattgataatttgattaataatggagctgttggagaagcatttggatgttattttaataaggattcgaaaataatctcagaaactaccgcaattggaattaaaattaatgaagcaagaaaaataaaaacacatattgcagtagcaggtgggaaaaataaagtagagtcaattattgcaactgaatataacgacaatgatggtgttttagttacagatgaggcagcagccaaaggaatattaagtaaactaaatagttaaattcagttattaaattagtttgtaaaatttatttttataaaaaagaaaagcattattaggaggtaattgtaatggtaaacgtagcaattaatggttttggaagaataggaagattagctttaagattaatgatcaacaaccctgaatttaatgtggttgcaatcaatgacttaacagatgctaaaatgttagctcacttattcaaatatgattcagctcaaggaagattcgatggagaaatcgaagttaaagaaggagctttcgtagttaatggaaaggaaatcaaggttactgctgatgctaagcctgaaaacttaccatggggagaattaaacgtagatatcgttttagaatgtacaggattcttcgcatcaaagaaatcagcttcagctcatatagcagctggtgctaagaaagttgttatttcagctcctgcaggaaatgatctaccaacagtagtttacaatgtaaaccacgacatcttaaaggcagaagatacagttatttcaggtgcttcatgtactactaactgtttagctccaatggctaaagtattaagtgatgattttggattaacaaaaggtttcatgactacaattcactcatacactaacgatcaaaacactttagatgctccacacagaaaaggtgatttaagaagagctagagctgctgcagcttctatcattcctaactcaactggtgctgctaaagcaatcggattagttattccagaattagctggaaaattagatggtggtgctcaaagagttccaacaatcactggttcattaactgaattagtttgtactttatctaagaaagttactgtagatgaagttaacgctgctatgaaagctgctgcaactgaatctttcggatacactgaagatgaaatagtttcttgcgatataatcggaagcagcttcggttcattattcgatggtactcaaactaaagttatggaagttaatggagaacaattagttaaagtagctgcttggtacgataacgaaatgtcatacactaaccaattaatcagaactttaggatacttcgctaacttaaagtaatttgaattatatcttagaacataaagagcgcaaatttatgttaaagtaaataagtctggttttgtagtataaggctataaagccagactattttaaaatgaaggaataatcaataaaataaatatcagaggtgaaaataaatgaatttcaataaaaaaacaattgaagatattgaagtgagtggaaaaaaggtactagtaagatgtgacttcaacgtaccacttaaagatggagttataactgatgaaaacagattagtaggagctcttccaactattaaatatttagtagaaaaaggtgcaaaggttattctttgttcacatttaggaaaagatgcttcaaaatcattagcaccagtagctacaagattaagtgaaatgctaggaaaagaagttgtttttgctagagatgaagaagttgttggcgaaaacgctaaaaaagcagtttcagaaatgaaagatggagatatcgttttattagaaaacacaagatgcagaaaagaagaaactaagaacattccagaattctctaaagaattagcttcattagctgatgtatttgttaatgacgcatttggaacagctcatagagctcactgttcaactgttggtgtaactgattacttagatacagctgtatgtggatacttaatccaaaaagaattaaaattcttaggaaatgcagttgaaagtccagtaagaccattcgttgctatcttaggtggagctaaagtttctgataaaatcgctgttataaacaatcttttagataaagttaacacaattattatcggtggaggaatggcttatacattcttaaaagctcaaggatatgaaatcggaacttcattagttgaagaagatagacttgaatatgctaaagaaatggttgctaaggctgctgaaaaaggagttaaattcttattaccagtagatcacagagttgctgcagaattcaaagatgtagaagctacaattactgaagatcaaaatattccagtaggaaacatgggattagatatcggaccaaagacagaagctttatatgctgatgcaattaaagatgctaagactgtaatctggaatggaccaatgggtgtatttgaattcgaaaactataataaaggaacaattgcagtagctaaggctatggctgatgcagatgctactactataattggtggtggagattcagctgctgctgttaatattttaggatttggagataagatgactcacatctcaacaggtggtggagcatcattagaattcttagaaggtaaagtattaccaggaatcgctgcattaaacgactaattttgaatagttagtttggaataaataatattttcaaaagaaaattataaatttagttagattataaagtgaaacttgataggtagtgattgccccccgaatgaatttaagttgaacttatccacaagaatgtagacatatcttttataattaggtaatagattgttgaaaatgctggatggttaggtaaggtatttaaataattagggaatatatatttaagagaagtgataagctattttttaggaagcaaattcgacgggatttgatgaatctaaggccaaggattcattcttaaatatctagtttgtaatttttgtagatatataataagcttaaggaaatctgatcactttccttaagcttatatagattcataatataattagataatttataagtttcattaataaaaaaattatgaggtgagtagaatgagaaaagcaattatcgcaggaaactggaaaatgaataaaactattgatgaagcagttaaaatggtagaagaattaaaaccattagttaaagatgctacatgtgatgtagttgtatgtcctacatttgtatgcttagatgcagttaaaaaggctgtagctggttcaaatataaaggttgctgcacaaaacatgcattttgaagaaagtggagctttcacaggagaagttgctccaggaatgcttgaagctatgggaatagattatgttgttttaggtcatagtgaaagaagagaatacttcaatgaaactgatgaagcactaaacaaaaaagttaagaaagctttcgaacataatattactccaatcctttgttgtggagaatctttagaacaaagagaaaacggaactactaaccaagttattgaagctcaaataaaagctgatatagctggattaactaatgaacaagtagaaaaacttgttattgcttacgaaccaatctgggcaattggaacaggaaaaactgctactgatgaacaagcaaatgaaacaatcaaagctataagagctatggttgctgaaatgtatggatcagaatcagctgaaaaaacaagaattcaatacggtggatcagttaaaccaaatacaataaaagcacaaatggaaatgtctgatatagacggagcattagttggtggagctagcttagttccagctgatttcgctgcaatagttaattattagtattaaattttttaagctgtcttagaatgacgaaaatcgcactaagacagctttttttaagtaaataataatttgatattaaagtaattcataaaaaatttatattataataacataaatttactttaaatgtttataaagttgcattaagtgtaaaaaaataatataatttaagatattaatagtatgtaaaacataataaatgataatatttaatattataaatttataacaaataaatttatttagttaacttacagatattaatttaataaagaaatctaagaattttatagtatattttgtgaaaatatttggagggataggaaatgtcaaaaaaacctgttatgttaatgatattagatggttttgggattgcgccaaaatcagaaggaaatgctgtaactttagcgaaaaagccaaatttagataaactattcgaaaaatacccaacttcacaattacaagctagtggtttagctgttgggttaccagaaggtcaaatgggtaattcagaagttggtcacttaaatattggatctggtagaatagtataccaagaattaacaagaattacaaaagcaatagcagatggagatttttttgagaatgaatcattaaaattagctatgactaatgctaaaaagacaggatcgtctttacatttaatgggattattatcagatggtggagttcattcacatatagaacatttaagaggtcttttagaatttgctaagaaagaagaagttcaaaatgtttatgttcatgcatttatggatggaagagatgtgccaccttcatcaggacaagaattcattgaaaaaactgaaaagatgatggctgaagtaggggtaggtaagattgcaactgtaagtggtagatactatgcaatggatagagataatagatgggaaagagttgaacttgcatataatgctttagttttaggaaaaggtgaaactgcaagtagtgcaactgaagctatagaaaaatcatatcatgataataaaactgacgaatttgtattgccaacagttgtaactgaaaatggtaatccaactgcaaatattaaaaatggagattcagttatattctttaactttagaccagatagagcaagagaaataactagagctatcaatgataaagaatttgcaggattcaagagagaaactctagatcttacttttgtaacaatgactcaatatgataaaactctagaaggagtaaatgttgcatatactcctcaaactttaagtaatactcttggagaatatgtaagcaataagggcttaaatcaattaagaatagcagaaactgagaaatatgctcacgttactttcttctttaacgggggagtagagaaagaaaatccaggtgaagacagaaaagttataccttcaccaaaggttgcaacttatgatttgaaaccagaaatgagtgcatatgaagtaacagatgaattactagatagattagatagtgataaatacgacatggtaattctaaactttgctaatccagatatggtaggtcacacaggagttgttgaggctgcagttaaagcaatcgaagcagttgatgaatgtgtaggaaagattgcagataaaattttagaaaagaatggatgcttatttatcactgcggatcatggtaatgctgaaactatgatagatttttcaacaggaaatccatatacagcgcatactacacatgaagtgccatttgtttgggttgcaaatgatactgaaggtaagaaattaagcaacggaaaacttgctgatattgctccaacaatgttagttcaattaggacttgaagttcctacagaaatgactggagaaaatctaatagtaaataagtaattttaattaataaaaaagctgcttgaaataatttttaaattgtttcaggcagttttttattttagaaaaaatataatttttaaaaatttttttattaaaatttgagttgtcattaaaaaagccaattttgtatacactaaataataagcttcattaattaaaacttattatatatattgcaaaaataattctttatgataattctgaaaatattgcaagaattttatcagtaattgtgaatttaaacatatatatgactaagtacaaatctacttaaataagggaagaaaaataagattttaaagaaggatttactcagaattgcataaaataagcataaaattaatatattagtaaaaaagatttaggattgataatatgaaaaagaattttgcatattctgctgattttgatgagtatacagaaaaattatttagagaagctaagtatctaggtgagggacacaatggtgtggtttatgagttgccaaataaaaaggctatcaaaatatttctgaggaaaaaggtatgtaatgatgagggcagtattcttgctaaaactaatgggtcgaaatactttccatatatgtataagagaggaaaattatatgtgataagggatcttgtagatggaataaggcttgataagcatataaaagagaatgggttaagtgaaagattagttagaaacatatatgaattattattagagttcaagagacttaaatttaagaaattagatattagatgtaaagatgtttatgtctcagaggatgaaaaacttatgataatagatcctaaaaaggcgtatagtagaaaggttgattatccaaggcatttaatgaagggattatgtaaagttggtgtgttggatgagttttttgaatgtataaaaaaaatagatgcaaagaaagctgcatcatgggaattgaaatttagaagatattgcggggcaaaaaacctatcgatattagatgatgattaaatatgtaaagatataggagaagataactcaaaatgaatatttaatgtaattagttataagtaaaatacttataaacgttatgacattagtatcattttgagtaaatctcttatgaaatttatataaaatattatatcggctaatatgctaagaataattgtataaattaaacaaataaattatgttatataagcttgacttttgatattgtttaatcgtataagtcagttttatatttacataaaaaataatatgaatattcctaaattattttaccaataatattatggtaaatgaaataaaaagctttttatttagtaaattatgtattataattatattgataagaattctcaatacaattataaaaatgaggaggtaatattaaatgaaagattatttagaaattgtagatgtagttgcaagacaaattttagactcaagatgtttcccaacagtagaggtagaaatatatttagaagatggaacaattggaagagcagcagttccatcaggagcttcaacaggaatgtatgaagcagtagaattaagagatggtgataaagataaatttttaggaaaaggtgttttaaatgcaattagaaatgtaaatgaaattattgcagaagaattaattggatgcaatgtgtttgaacaaacttacattgataaaatgctaattgaattagatggaacaaacaataagagtaagcttggtgctaatgctatattaggagtttcattagctgttgcaaatgcagctgcaaatgcattagatatgcctttatatagatatatcggtggagttaattcaaaagtattaccagttcctatgatgaacatattaaatggtggatcacatgctgataactctgtagatttacaagaatttatgatcatgccagcaggagcacctacatttagtgaagcgttaagaatgtgtgctgaagtttatcacacattaaagaaaattttaaatgataaaggttattcaacaggtattggtgatgaaggtggatttgcaccaaacttaaaatcaaatcaagaagctcttgatgtaataattgaagcaataggaaaagctggatataaggctggagaagaaatctttatagcaattgatgctgcttcatcagaatattataaagatggtaaatacgtattagaacatgaaggaagaacattaacatcagcagagatggttgatttctttgaagattgggttaataaatatccaattatttcaattgaagatggtatggcagaagaagattgggaaggttggaagcttataactgaaagattaggaaagaaagttcaattagttggtgatgatttatttgttactaatacagaaagacttgaaaaaggtattgatcttggtgtagctaattcaattcttattaagctaaatcaaataggtacattaacagagacattaaatgctatagaaatggcaaatagagctggatatacagcagttgtttctcatagatcaggagaaacagaagatacaactatagctgatttagttgtagctgtaaatgcaggtcaaataaagactggagcaccagctagatcagaaagagttgctaagtataatcaattgttaagaattgaagaagagttaaatgatgttgctgagtacagaggcagaaaagctttctttaatataaaataaattattattaaagataatttttaagtaagaagtaattttgcttaaggataaatcataataaagtttattaggaaaagttataggaatatagttcttataacttttttctaaattctaaataattcgatcttggtgtaatttttattacataagttgtaataagtaaataaatgtgatattattaaatgtatgttattgatcattataggaggtgttacctatgcaaaatatattattaatttttgaaggaatattaggcttagctactattataactgtttatatgcaacctagtaaagctgatgcgttaagtggtttaatacaaggaagcacaaaagatacattctttgcaaaaaataagtcgagaactaaagaagtaattcttgtgagattaacagttatttttatggcattgtttgcaattaatacaattttattaaatttaataaaataataactataagctactttacttaggtagcttttttttaatgtctaggaaagtataaaaattccgaacgctgaaagcgacttgtagacttgtattgagaagctatatgtggtaaattgatgaaatgattaagagtaaattaagaagaatattagaagaaaattggaacgaattttataaaaaatatagaaatagaataagacctaatgtcattgcagaaataaaaaaagttatgaaatgcaaagatataaataatggctatattgaattaaaatgtcatgattgtggtgaaataaagaaagttggttttacatgtaaaagtagattctgtacatcatgcggtaagatttatgttgataattgggttaacggaatgctaggaaaattaataaatgtaaagcataggcacatggtgtttacaattccggaggagcttagaaattattttggaagagaaagagatagattgaggttacttccgcaatgtgcagctaaagctgttacgagttggatgagtgatcaaaataaaaaagaagaatttatccctggaattatatcagtgatacatacttttggccgggatttaaagtggaatcctcatgtacatatgatggttacagaaggtggaaagggaaaagtaacgatatggagaaattttaaatatttctcatatgaagcattacgaaagagatggcaaaaaatattactagatgcaataataaaaagagaaggaaataaagatagttttagacgattaaagaacaagatatataaaaataataaagaaggattttatgttcatgctaaaaatgaaataaaatcggcaaagatagcagcaaaatatatagggagatatgttggccgtcctgcgatagcagaatcaagaatacttgcgtatgatggtaaaagagtaacctttaaatataaaagacacgaggataacaaagaagtaatagaaaaagtgcccgtgtttgagtttataaaaaaagtcataatacatataccagacaaaaactttaaaatggtgagatactttgggctatattcaaggagaagtaaggataaagatcaatttattaagatgatagataaaaaaatagtacaaattaaaaaatccatagaaaggtgggaatataggattcttgcctcttttggtgtagatccgtgtaaatgtcctaaatgtggaagtaaaatgaaatttaacgatatagtgtatccacgatacggctcgatgcgagaatattttaaaaagaaatttataaatgaaggtaaagaaaagttagaaaacattctggaaatatatgcaattgcaaaaggagttctatatggtaaaataaagccgacaacaacatagttggagggatactaagtgaaagacattgtatcatgtaaatgtttaaaatgtggaataacagaaaatatacctagggaggttgtagaatactttgatgagatggatcaaagtaacatagatgaaccgccttgtttttcatgcgaaaaatgtggcggtactatgagaccaaaagaatacgatggggtatattggaaaaaatataagttgtgataagagaaccatagagaaaatgcaatctctatggtttttgctttaattattaaaaatttctccgaatgagcgtggcgcagccactttgttctttttaaaattgtagtatttctatataattatagaaacttcttattatttagaaaataataaatttaatcgaatagttaataaagtgatgtataaaacgtattgactaactgtaactatatggaatataattaaatgaaaataaatcttagtaattcaataggaataatatgaaaaaatattaatatgattataaaagagtaacgcgatgaagggaacaagtaagttagtggaagtttttagagaggaattctcaaaaggctgtgaggaattctaaattgaacctagttgaatgcatcctggagcactaagttgaaattaaaagtaggcttagcaggtgtgcctgatatagaagataaatatgttattgaataaaaatgcatttaatcattgaagataacaatcagagtggaacctcggaaattttctgcctctgtttttgcagaggtatttaatttttttaggagaaatttatatgccaaatttttaggggaaatatatgatttgtaaataattatatatagataatttgtatgtataaaattgtggaggggattatatggctattaatagtaaagaaattgtagaaaataaaaaactagaggaaatattaaagatggttgaaaaaataaggtttggatcaataactttaataatacaggatggagtagtaatacaggttgacaagaacgaaaaaataagaatgaggtagtattttagcgttagcatctagaggagtatgattatatattacgagggtaaagattaatgagggttttaagcataataaactcaaaaagatgttgacaaatttgagtttaaggaatatattatataaaaatatagcaatcttatatgaataagagtatatggaaaaggataatattcaaagaatctgactggaaaaccagaggatgtacttctagagatagaagtatgtcctcttttattttgtatttaaggcacaatcaaaaataatagatcagtacgattgcttaaagattttacttaaacaacgatttaaaggaggagtatcaagagtatgggaacaatcaatttaaaagaatcttctatgacaataaaaggggcatcaatattaaatataattccattaataccacaaaacgagctttctcatcttgaagcaccatcatgtataatgcttgacaaatttagaggagaagcaggtgaatattttgatgtatttagacactgcaaacattttatagctgatgcatatgtaattccaggtaaaaatcatgatatgcatggtcaattatatggcaaagaagttgttgaaatcttctctcacggataggaaattagttaattaatataatataaatagaaacaagtattaaaaaattattaaggattcataatgataatcgtgaagggaaataaaatataaatattttatttatcataaaacatagtaaacaaataagaattatattaataatatatagtaatttatatttagaaatagcagaaacctttatatataagaaataaagaatagtgtagaaaactttacactagcgaaacattaaggaggagagaaaaatgaaaatagagtcattattagttcatggtgcaattgatggggatgagacaacaggatcggtgaatgtcccaatctatcaaacttccacatataagcaagaacagttaggtaaaaataaaggatatgaatattcaaggactggaaatcccacgagagaagcattagagaaaactattgctttgttggaaagtggaagcggggggcttgcatttagcagcggaatggctgccattacggcggtattatctttatttcacagcggtgacaaagtgataattccaagtaatctttatggaggaaccttcagagtaattgataaagtatttaagaattttaatcttcaatatgaaatagttgatttttctagattaaatgatgtaaaaagaattctagaaaatggaaaggacaacacaagtataaaggctgtttttattgaaactccaacaaatccgctaatggatattactgatatagaagaggttagcaagcttgcaaaggaatacggagcacttactgttgtagacaatacatttatgtcaccatatttgcaaagacctttagaatttggggcggatattgttgttcatagtgccactaaatatttaggaggtcatagtaatgtggtagcagggttaatagctgtgaatagtgaagaaatgtgggataagttgcattttatacagaattcaactggaggagtactcggtgcatttgattcatttatattgcttcaaggtataaaaacattaggtgttagattagatagacataatgaaaatgcagagaaaatagcacgatttttatcgcaaagtgaatatataactaaaatatattatcccggattaaaagattctaaggggtatgaaattcacaaaaaacaagcatctggatttgggggagtattgtcttttgttataaatgaaaaaatagattacaaaaagtttctaagctcactaaaacttataactttaggggaaagcctaggtggagtggaatctttaatatgtcacccagccagcatgacacatgcagcaattccatataaaataaggcaggaggttggaattgtcgataatctagttagattatcagtagggatagaaaatatcaatgatctaattgaggacttaaacaatgcatttaaggagagtttgatatgaattatgtaagtgatataaaagaacttattggaaatactccacttataaaactcacacatatcaatattaaaaaaaatgttaatatatttgctaaacttgaatgttttaatcctggtggcagtataaaagatagaattggagtaacaatgattgagggggctgagagaaatggaagcttaaagaggggatataccatagttgatgcaacagcaggaaatactggtcttggtatagctctagcggcaataaatagaggctataatataatctttgtagtgccaaccaaattttcaatagaaaagcaaaagctaatgaaagctttgggggctaaaatcattaatactccagatgaagaagggatgcttggagctataaataaagctaatgagttattaaaagagattcccaatagcattagtctaggtcaatttgaaaatgaagataatcctttggcccattataaaacaacagggcctgaaatatataaagctttagaaggtaatataaattatttcgtggcaggtgctggaagtgggggcacatttactggtatcataaaatatctaaaggaaaagaataagaacattaaaggagtgcttgcagatccagaaggatcaacaatggttggtggagagcataagagttacaaaatagaaggcatcggaaatgattttgttcccaaaacaatggatatatctttagttgataaagttataaaagttagcgatgatgaggcttttaagaatgtgaagttattggctaaaaaggaaggtttaatagttggatcatcatctggagcaatactttcagcagcattaaagcttactggtgagattgatagtggaaatatagttgttgttttccctgataggggagataggtatctaagtacaacattgtttgatgactagttgatataaataaattagaaagttaagaatataaaatatataaagacaaaattttgatttcaaattttttatagtataggattttattatgatacctttattaatgaagttgactagaaaactagagactgagtttcttgattatgcattatttattacatgagaaactcagttttattgcttgttaaataaatttttagcagacataaaatatatggagtataatattgtaataatattttttgaaacatatagatccttaaaattaaaatattttagtcatttacagatatccttttgataaaagaggatatctatttttgttaaataattcttaaatgtatatattttaattgatttttttaattgataactttgtttgagtatttgtagtaacagaattttaaataaaatttatcattgcatcatatataaatagctcaaatactactatttttttattaactaaactatagtatataaataaattagaatatatatgtcaatactaatattaaaataagataaaatctatattgtacaaggttattgtggtagtatataggtatataggaataaaatatagtaatagtataatggaggaagaaattatgggaataaaacaaacattagcaagttttatgaaagaacctgcatataggccaatggacattgaagagttaattgctgtatttgatataaagaaaaatgaatataatgcgtttaaaaagactttaagaactatggaagatgaaggatttattataagaactaaaaaagacaagtatatgatagctaacgcgaatcatgaagaagaaggtcttattataggatcgcttcaatcacattcaaaaggatttggatttttaattccagaagaagagggacaaaaagacgtatttataccaagcaattgtataaatggagctatgaatggtgataaaatatctgttagagtaacaagagaagatacaaagaccaagaaaagagaaggagaagtagtcgaaattattgaaagaaacactactagaatagtaggggtatatgaagattctaaaaattttggatttgtagtttctgaggatccaagaatatctaaagatgtattcatctcaaagaaggataggaatggtgctaaggatggagacgttgttacagttaagataacaaaatggcctgaggaaaatagaaaggctgaaggagttgtaacagaggttttaggaagaaaaggtgacagaggaatagatattctaatgataattaaaaaacttggacttccagaagaatttagtgaaaaagttcaaaaatatgcggaaggtatttctgagcaaattgatgaagaagaatataaaggcagacgagatttaagagatttgagaatggttacaatagatggtgaagatgctaaggacttagatgatgctgtatctatcgaaaaattaagtaatggcaactttaaactaggagttcatattgccgatgtaacacactatgtaaaagaaaatagtccattagacaaggaagcattaaaaagagcaacatcagtttatttaatagatagagttgttccaatgttacctagaaaattatctaatggaatatgttcgttaaaccctagagtggatagattaacattaacttgctttatggagatagaccataaaggaaaagttgtagaacatgaaattgtagaatctgtaataaaaactaatgagagaatgacatataaagatgttacaaagatattaagagataatgatgaagaacttataaaaagatatgactatcttgttgatgactttaaaatgatggaagagctatgcggtatattgagaaataagagaaccaaaagaggtgctattgattttgaaatagcagaagctaagataacacttaacgatttaggaaagccaattgaaattaaaccatatgatcgtgaaatatccaataggatgatagaagaatttatgttagcagcaaatgagacagttgcagagcatatgtttggtactcatataccttttgtatacagaatccatgagagcccagatgaagagaaattagctaaatttaaagaatttgtttataatttaggatatgctatccaatggacagaagaaataagaccaaaaagttttcaagagattctagaaaaggttaaaggaaaaaacgaagaaacagttgtaagtacactactattaagatctatgatgcaggcgagatatgcgccagagtgcagtggacattttgggcttgcagctgagtactactgccacttcacttcaccaataagaagatatcctgatttacaaattcatagaatcataaaagaatatttgcatggagaagtagatggaactagaataaataaattaaaaaatatagtaggttatgcagctaaacaatcttctgaaatggaaagaaaagctcaagatgcagaaagagaagttgatgatcttaaaaaagctgaatatatgcaagagagaattggtcaagaattcgaaggaattatatcttcagttacatcttttggagtattcgttgagttaccaaatacaattgaaggtttagttcatataacagatttagacgatgattattatatattcaatgaagcaaatctaagcttgattggtgaaagaactaaaaagttatataaacttggagataaagtaaaagtagaatgcgttaatgtagatataacaaatagagagatattttttaagattacacaagagccagagagagaagaaacagataaagattttgaatcagaaggaaaaattagcgaagtagaaaaagagttagttgaagtataagatatgattttaatattctgaaggagcaaaaatttgtgcgtataaacttattttgagtgttgatatcagcaatgctcaaaataagttgatttacagaaatgggtataatataattttagtagaaatataaccatagcgggtgattatgatggcaagaaaaagaaatgagaattcattagcagaaaatagaaaagcaaggcatgactattttgtagaagaggcaatggaagcaggattggttttagttgggacagaggttaaatcaataagaaatggaagagtgaatcttaaagactgttatgcagatatatataatggtgaaatatttgtaaagaatatgcacatatctccttatgaacaaggaaatatatttaatgtagatccattaagagagagaaaattacttcttcatagagatgaaataagaaggcttgatggtttagtgtctagagatggatatacattaatacctctatcattgtatttgaaggacggaaaagttaaagttgcgcttggagtttgtaaaggtaagaaaaattatgataagagagattctatgttagaaaaagctcataagagggacatggatagggcaattaaggaaaaaaataaatattaattaagcatgctaccgaaagtataaaaatatttttggtagttttttattggcaaattgcaataacaaattgaactaatttctatttatgacttaaacacttgtattttcttaaactgcgtaaattttatctaagtgtgcctcaaataactcttcaggagtcttatagttaagtattctcctcggaagagtattcatccattcttctatgaaagcaatgtcatcagaagtgtagtctgaaatacgtttaccctttgggataaagcgacgtattagaccattatgacgctcattagtacctttttcaaaagatgaatatgggtgagtgaaatacacctttgtatcagtttcaatttcaagtgtggataagttagcaaactcagagccattatcaccagttatagtcttgaaagcttggctaaattgcttgccaaataaactgcgcactctattaagagcatcagcaacggcttcagcggtttttgctataatatcgattaccatagcatatctagttttacgctctactattgtaagtagtacattatcattattagatttttgaccaataacagtgtcaatttcccaatgaccaaactcgtgccgagtgtttatctctactgggcgatctgatatgctagaaccaagttttttcttatgctttttaactctagtagattttgtatttctacgtagcttcattggtaagtcagtgttttttatatctaataaaccaagatctatatggttatataatgtttttgtgcagaccatttgagaacgcttaaatctaccgttagcgatagcttcgccaacacaagcatctggtgaccatgaatgatttttaattttatccacagtatagtttatgaaatcactgcattctaagcgcttaaaagtgcggcagcagtttatacgatgctttttatatatggcttcgccagtatcggcaaggtatacttcaacgtatttttcttgtttaatttgagtggtagttccacgtctaatttcatttaagatagtgtttataggtcgttttaactcttttgctatcttataaggtgaaaagccatcttttagacgaagctggataagcatacgttcttcaaaattcaaatgtttatttttacgtgattctgtgttattatttgggtagtccatagtgattatcctccgtgtatgttttttgtttagcgattaaatcataacacagaataatccactatggattttttattagttcaatttcattttacaacaggtcgtagttttttatttatttaaaacacaagataatataaggttgttggataaaattgttatagaaataatctggataataaatggggacatttacaataaatatactattacaaaaatatgtgtcatataattttttgtgagtaataatatgtaaatgagattagtattaagggggaaataattgtgaaaaaacttctaaagttcagaaaagttatatcaatttttactagcttattctttataattactttatttagctcgttttctataagagtttatgcaactgagaatgaaaaaatgtttgacgttatcgaaatcactgattttcatggagcacttaatgattcatcaggaaatcaagttgcaggggttttagcagatagaatagaaaaagtgaaagagtctaataaagataggacattgattttaggtggaggtgatttgtatcaagggtctgcaacatctaatatcatgaaaggggttcccgttcaggagactatgtctaagattggaatggagataacaactcttggaaatcatgagtttgattggggattagatacaaccacaaatacaacaatgaaaggtgcagcatattcaatagtctgcagcaatctttacgataagaagactggcaagcgtgtatttgatccatataaaattataactaaagatggcataaagattgccgttataggcggaataacaagagaaacagaaacaagtgtatcacctaaatttgtgagtgactataaatttacagatcttgcaagtgaaataaatcctattgcactacaaataaagaaagataaattggcagatgtagtaattgtattggtgcatgaaggtgataatggtgataatgcaacagggccagtatttgatttagctaataatcttcagaatgtagatgctgtgtttggcggacatagtcatactaaaactgctgcgattgctaaaaataccaatatcccagtatatattgcgggatcaaacggtaaaggatatatagatgctaaattcaaggtgactagtgataataaaatcgtatttaatcagccaagtcttgaaacaagttatgtggcattagataatgacaaggggtataaaattggaacaccacaaacagacagtgaagttgataaaattgtaaatagtgctaataaacaaatagagccaatgacgaatgaagttattgggtataatacagaaaaagatttaacaagaaaattagatgcttctccatatggatcatcagttttaggaaattgggcatctgatgttacaagaagttctattaaagctgatgttggatttcaaaacaatggaggtcttagaatagatattccacaaggaaatattacagtcggaactatgtggcagtttatgccttttgataacacaatttataaattaagcatgacaaagtctcaattaaaggaagttctagagcaggctgttgcggataacagcaaggggttacaggtatcgggaattaaatttagctatgattcaaatcttccatcaggccaaagagttaaatctatcacaaaagaagatggaactcctattagtgataacgaaagtttatcagttgcagttccagattttgtggctcaaggaggagattcgtttactgcatttacaaagtacggtggattagatgttaaaaatgatactcatgttttagtaagagatgcatttatagattggtgtaaagaaaataaagataaaaatgataaaaatacaatacctaatactgatataccaagaatggttaatatatctagttcaataactttattagcaacaacagatgttcatggtacagttttaaactatgattatggaacagggaaagcaccatctaaagcacagggattagctaaagtttcatcatatgttaaaagtgtaagagaaaataataatgtgatgctaattgataatggagacacaattcaaggaacaccactatcatattactatgatattttagatactactttagagcaccctatggcaaaggttatgggggccatgaagtatgattcgtggacactaggaaatcatgaattcaattatggattagatgtattaaatagagtaattaaagactataaatcagaaggtatagcagtacttggagctaatatatataagaaagattcaacaaattttgtagatccatatataatgaaaagtttttatgttaatggtaaagaagtcaaagtagcggttataggtttagaaaataaatgcataccaagttgggaagataaaaaacattatgatggattggtatttaatgatcttgtagatgaatctaaaaagtgggttaaagaagtaaaagccaagggcgcagatgttgttataatatcagcacatagtggtcaagagagtgatgcagatgttataccagaaaatgaaattaatgcaatagcgacacaagttgatggaatagatgcaattatagcaggtcacacacatttaaaagtaaatgatctaactaagaagaatccagaaggtaaagttgttccaatagttgagtcaactaagggagctacaggtttggcacaagtggatatgaactttgatggaaatgcaaagcttataggaatttcaacaaaaaacattgttatcgataatagcatagtagatgatcaggaggttgtcgatttaattaaaccttatgaagatacaacattaaaatatgtagatacaaaaataggaacttcaactggagaatttacaggaagtggacagttaactgagcctactgcaattatggagctcattaataaagtacaaaaagaaagtgctgggactcaattatcaattgcggcaccattaagttctggagcatatatacctcaaggcgatgttacaataaaagatatgatggcagtatatgtatttgaaaactttttgtatggagtaaaaataacaggaaagcaattgaaggattggatggaatattcagttagatattatgctcaaacaacaggggataatgcagcagtaataaaagatccaatattaaatattccagattataacttggatcaattatatggtgcaacatatgatattgatttaacacagcctgcatgtactatcgataaggaaacaggaagagtaatatcaggaaatagaataaagaatttaaaggttaatggtgttgaagtaaaagattcagatgaatttacagttgctataaacaattatagatttaatggcggtggtggctttatgaaggccgctggactaagcaatactgatccaagtattattgtctatgattcaggaaaagcacttggtgatgatggccaagtgagaagtttaatgacaagctacattaaaaaacatggagagatatctccagattgctcaaataattgggagatattgaatgtagataaacagaaaaaagcagcttaagatatgaagcaattattttgaggaataaaatatataagtaattctagtaaagatgaagccatgcacatagatagatttatctacatgtgtatggtttcaaattttattgtagaatatttattattttctatgttaatatttttattagcatagatattgattttgaatatttgatagaaatatatagcatatacagcagatttaacaacataaatataaaataatttaatatttatactataaacttaaatttattaattaatttcgtaaaaaaatcttgcaatatatgcagaaagtatatataataaaaccaatccgattacaatacttggatttgaaagagcaaaaggttattctatagattttgacaaattaaaaaaagttgtatataattaggtcaaagctaaattaaataatctgaatatcttatcgagagcggtggagggactggccctttgaaacccggcaaccgaaatattatttttattaaatgatatttatatggtgctaattccagcagcttttagctgatagatgagaggatgaatttgtatggtgttttatgcgctagagatttattctctagcgcttttgttttgaggtgaacgttaataatcaagttaattattacatcaccttagttatccggaaactaacaaaacaaagtcaaaggaggaaatgtgtttgatagaaattaaaaatgtggtaaagaattttggggaaacacaagttataaaagatgtatcaataagcattaaagagggcgaaatttatggaataatagggcacagcggagcaggaaagtcaacattattaagatgcattaatggacttgaatcttatgatggaggttcagtaaatgtaatggggaaagaggtttcatcattagaaggaaaaagtcttagggaatttagaaaagatttggggatgatttttcaaaatttcaatcttatgcaaagaaaaaatgtttttgataatgttgctcttcctcttgaagtgtgggggtacaacaaaagtgaaattaaggacaaagtattaagattattagatttagttggattaacagacaaaaagctaagcaaaccgtcagagcttagtggtggacaaaaacaaagagtagcaatagcaagggcattagcactagaccctaaaatactactttgtgatgaggctacttctgccttagatcctaaaattacaaaagatattttagcgttactttctaaaataaacaaagaattagggattacgatagtaatggtaactcatcaaatggaggtaataaaagaagtttgtgaaaaagttgcactattagatggtggaaaaataaaagcagaaggaagagcagaagatttattcttacaaccaggaaaatcattaaagaaattcttaggagaagaagatgaagggatactaccagaagaaggtgttaatatcaagatattcttcccaagtgattcttctgaaaatgcactaatcacaaagatggcaagggaattagaaatagatttttctatagtttggggaaaacttgaaaaatttagaagtgaagtattaggtgggcttgtaataaatatcagcgaagaggataaggacaaggttataaagtaccttgaaaataaggatatcttattggaggtgatcgaataatgaatcaggtaatagtaaaagctttaatagaaactctagagatggtttttgcatcgactataggttcacttattttaggatttatacctgcaataatattaacagttactgcaaaagacggattaagaccaaataaaatagtttatacaattttagatttagtaattaatatattaagaagttttccagttatcatattaatggtagcaataataccattaactagatttattgctggtaaatctataggtacagaagcagctattgttccacttacaattgcagcagcaccatttgtggcaagaattatagaatcatcacttagagaagtggataaaggaataatagaggcggcaagatcttttggagcatcaaacactcaaattatctttaaggtaatgcttaaagaagcaattccttcaatagcatcaggaattactcttacaataataagtattgttggatattctgcaatggcaggaactattgggggtggaggacttggtcaagtagccataagctatggatatcaaagattccaaactgattatatggtagtaacatgtattgtgttaatcatagtagtacaaggactacagcttataggcaattatttttacaataagttatcaaaatagggggaataaatatgaaaaagaaatcaattttatcagtagttttagcaggagtagttacactaggattagtaggttgtgggggcacagctacttcaggaagcaaagattctaaaaatgacaaggtaataaagattggggtaacaccaaagccacatgaagaaatagtaaatatagctaaaccattacttgaaaaagaaggatatacagtagaaataacagaatttaatgattacaatcaacctaacactgctgtagaagaagggtcattagatgcaaacttcttccaacatactccatacttaaacgaacaaaattcgtctaagggatatcacctagtttcagttggtgcagtacatttagaaccaatgggattatactctaagaaggtaaaaagtttagatgagcttaaagatggagctacaattgctgttcctaatgatccatcaaatgaagctagagcgttaaaattattagcaggaaaaggcttaataaaaattaaagatggagaattagttacatcaaaggatattactgaaaaccctaaaaacttaaagtttaatgaattagaagcagcagcagttccaagagcaatagatgacgttgatgctgcagtaatcaatggaaactatgctatagaagctaagtttaatccagcaaaagatgcaattattattgaagataaggcttcagaagctgctaaaccttatgcaaacatagttgttgtaaaacaaggtaatgaaaatcaagaaaagatcaaagctttagtaaaagctatgacatcaccagaagttaaagaatttatagaaaaagaatacaatggttcagtaatcccagtattttaatagttcattttgagcatatagattcaaaaaagaaattgaataataactagtatttgcagcatgaatatgctgtattacaagaagagaggttatgccaaatgtcatttaggcaacaaaatgacattaaggcatgccttctttttttatcagaaagttaaatgggggcttttgttattaagaaaaattgtagattctatatataacatatctttaataattttctggaataatgtatacttttaagtatatttaggaaaataatttgatttaatttatataaaagtaagaatttactctaaaggggaataaaaaatgaacatatcagaagtaaaagttaaattaactggtaatgatatattaagtataatcaatgaatttgttaaggttgatgggttggatttaagaagagtaactattaatgatgggataatattagaaggaactttgaaaaagggaataaatatagactttaatatgaaggttcaattagttgggtgtgttcataacaaaattactgtaaagatagttaaagttaaagtattaaatgttggcttctttagaatattaagaagttttgtgttaaagcaattagcaaaagcttttaaaaagtatggaatagatagtgatagagataaagtaataattgatataaatacaatacttcaagatgtaccatacataaatctaaatattagtgaggtcttcatgaaaaaatcagaggtatgggctgaaatttctaatgttgaggtctcaatactaggcgaattaataaaggaaaatgatgtcgaagagaaaagtgaagaagaagagagtgatgtagcatcattggataatatagataaaactaaagattgctattctgttggaagaaatagaattacaaataaattatctgaaaatgtgagaaattataaagagtatatatttgtattgccagatatagcttctttaatatatagattacttaaggataaaagagtatctataaagactaagcttataatgtcggcaggaatagcatatgtaactgtaccagttaacataatacctaatagtataccatttataggtgtgattgatgatattggagttatattttttgttttaaataagattcttaaagatataccattatctataatagtagagaattgggaaggtaaaaatgatatacttttagtattaaaaaaaggaatagaatatctaactaactttacaaatgctgcaaatattgaaaaattatatagtgctgtagaagaattatcatcactatagaaaatattatttataaatttaataacatatagattattaagtttataaattctctatgaaaaatataataaataagttagacattcagagaaaggaatattatatggcgaaaaaagtttatgcaatacagtatggttttgatattaaaaacaacaaaaaggttgaaaatgtaatagttaatacttggaatgagtgcttagcatatgtaaaaggggtaaagggagctaagtataagagtttcgaagatatcgaagaggcaaaatcatatctaaacgaaggaaatagaatgctaaaaaagagtgatgaaaattatccaaaagattgccttcatgcatatgttgatggaagctataattcttctgacggaagatattcttatggagtagtttgtgttaataatgatgttgtagaatatatagaaagcggagctgaaaaagatagctctactaaaaatataagacaaatagcaggcgaacttaagggagctgttagagctgttgaatatgctttagaacatggacaaaaaaaagtagttctatttcatgattacgaggggatagctcatcatgcaactggagcatgggaacgaaaagaagaatcatccatgcaatattataaaaagatgcaagagttaataaattctggagtggaaattatatttgtaaaagttgatagtcatactggagatttatttaatgagcttgttgatgagaaatgtaaagagtgcttagggataacttctgatagaaccgttgaaaaatggttaagtaaaaatgttataagagtttctggtactaaggttaaagaagaaatcttaagcatagctccaagtcattcaaataatataattttaattggcgaagatgaaaatctacaaatggaaaatatattaaatgtagataagaaagatgacgatgaaattagatttgaacaaattattaatatatatagaaataatgctgttgaaggtaaaaagataatttctaagttattgagcaaagaaaaggaaaaattaatttattatttacttaaagaggaagctgataataattaaagaggtatatatgtctggatcataaatttacatttaaaatgctaataataaaagtgcttaattaggactggaatgtagaaagctgattgtaatatgcatatttactttttagaatgcttttaaaactatatataatcatggaataaattaacttggataactttttgattaatacacaatatatttatagaaaataaattgatgttaaagaggtgtttattatggaaagattttctaagggaatgatgactggatttttaattggagttgctgtcgaaatgtctctaatgccacttatggatagaagaagtcaaaaaacaatgagaagagcaggcagaagaatgaggaatatggctgaatcagcatgtcatgaagtttatgattggatgagatagaattaaaaaagaaagtataatatgtaaatattaggtataataaaaatagaagggcatgaatttctttcatgcctttttatttttatttattgtatttatacttttgtacataaatatggataataaaattaaattatataaaatttggggcacatttatatttttatgcagttttttataaatttatgttataattaaggaaattatattaaaataactaaataatttgttgaatagagaaggattaaaaagatggaaattctatcattaggagaaaaaatcaagagaagaagaaaacaattaaatatgacgttaaaggatttggcaaaagacagaataactccgggacagataagtttggtagaatctggccgttcgaatccatcagtagatttgctagaatatttagctgatgcattgaacacaaatgtagaatatttaatggaatcagaagaaagccaagctgaaaagattagtttatattacgaacaggtaggggaatcatgcatacttcagggagattacgaaaaaggtcaaagatatattgataatgctctatactactgtgaaaaatataacctagaatatagaaaagcaatgatatattttataacagcaaaatcctacatgtataaaagagattttcctatggctcagaagttttttttatcagcaaatgtaatttttgtaaaaaataataattatgagcaaataataaaaacttttctacatttagctaacattgctttagaattaaaggcatatcattcttctagtagttacttaaaacaggccgaaaaagtgtatatagacaataaagttgtggacgagtttttaatgggagaaatatactacaatatggctagaacatattacgatgtagaagaattggatttagccctagaatattcttgtctagcgagaaatagatttgaacaagtatataatgatgaagattatgcgagaaatctattctctttagcagaagaatttaataaaaaaggtgacttgccgaatgcaataaagtattcaaagaaaacattagaagtatataaaaagatacagtataacaagagcatagttaatatagaacataatttaggaaagttattttatgaactaggaaatttagatgaatctcttaagcattatgaaatatcaaaaagtattagtacacaaaaccgtgtaggatgtataaatgatatactaatagatatttgtaaaagttatctgaagttaaagaatactgaacaatgtagcaaaatattaaaagatatagaaaatagaattgaagagcatgatatagacagaaaaatcgaatgtaaactaataaaatatactatgtttaatattgacgataaaccagaacaagcagaaagtgtattgattgatacatatgtgctagcaaagaatagcggaaagttgtccaaggctgctgaattagctatgagagtcggaaaatatttcatagataaaaaagaagaagaagaggcttcatattacttaaatcaaggaataaagttatttaatgaagcagaaaaattagaaaattacaaattataagtaagtgggtgagatatttggaaatactatctactggcgaaaagataaaaagagctagagtatttaaaggtataacattgaaagaattatgcggaaataagatttcaattgccaagatgagctgcatagaaaatggaaagattaaggcagataccgaattactaaattatatagctgagaagatagaaatagatgtagattatttgatagaagatgtatatgaacaaatatcaaataatctaaatacaataaagaggaacgtatcttgtgatactgattctgaaaataagttgaaagataacctaagctatgcactaaaatataaatattatgatttagcttttgaattaatacacatactattttcgtattatgtagaagaaaataaggttgaaaatattcaacttatagtttctcaatattatgatttatatcaaagaaataatacggaagaaaatacagctatctactttaaagatatggcacgttatttatctcaaaatggtgaatatattgaggctatttcttactacagcaagcttagagaaatgtttagattgaaagaagatggatttgatagttcagagtactgtttaataggctacaatgaggctctgtgttatcagaatttaagaaaatctgaagaagcatatagcattttatcagaaatcataggatatgttgatgaccttaaaacagatgaaagcaagggaaaaatatatcatatatatgctacagtatgcattaagcttaaaaaagattatgttgatgaatataaaatgaaagcatttcaatatcaaaaatataatcctatttctctggcagcatctcatggaaattatggaaagtattattttgaagtagaagaaaaggaaaaagcaatctctgaaatagaagatggaataaagatatttccacaagataatgtagaaaaatatgtggagtttttgaattattgtacaagaatattaattgataattcagagtatgagatagcttataggattacagaagaatcattaaatttagctattatgactgataatataaagttaattgagaagtcatattattttaaaggtataattcttcagaaaatggacaaacatttggaagcagaaaaatatatgaatttatcattagattcgttgtttaaatttggtaccagagaagaaagaagaaatagatatgtagatatgggtaagctttattataaacttggacttacagcggattcgctaaaatactttaatcttgcattagctgttgataaaaaaatctaatttctcgtaaatatatatagaagggcgatattttgttaattcgattataatggattaacaaaatatcgccacttctatttttttatattcacaattaagcatttaagatcagtaatgatatatttaagctattaaattcatatggatattattgttactaattttttgaacaagagtcaatgaagtaatctaataaatcatctatattaataactcctacaattttttcgtcttcaataacaggcattgttataatatcattttctcttagacgcttagctacagtgagtagatcttcgtcagattgcgcagagataactgattttgacataacccactcaactggacagctaacataatgtcctggatgtatcatgaatctatatatatcagcttttactatcattcctactacaatttctttatcatctactactggcattccattaatattaagtttgtccataaaatctaaagctttatctatagtatcgtttacattaattgtatggaaatttggtttaatgatagaacttattttcataacatcacctcttttaaaaagtttaatatcgttaagctgtaaaataacaggctaataatatttatattactattttactataaaacaacaaaatttaaaataaatctttagatgataaaaaaattaaaaaaagactaaataaactttgactttctttgacctatgtattattatatagataaagaggaattatttaggtatagtgataaactagttttaataataatttcaaaatttaacatagagatttaggaggaataagtatgaatattgataaaatgacgttgagagttcaacaagcattaaatgatgccaatgttacagctgttaaatttaatcatcagcaaatagatttaattcatcttttttcagctcttgtagagcaggaggacgggttagttcctaatattcttactaaaatgggtatatcagtaaagaatttaaaagcgtcagtaaataaggaattagatgcaatgccaaaggttttaggagaaggagttggcaatgtatatataactagaaaagtagaggaagtgttaattaaagctgaagaattttcgaaacagtttgaagattcatatgttagtgttgaacatttaatgcttgctattatagaaatagataacaatcaagtttctaaaatattaaagcaatataatataaccaaggataatttcttaaaagttctttctgaagttagaggaagccaaagagttgaaacgcaagatccagaagggacatatgacgcattagcaaagtatggaactaatttagttgaccttgctaaaaagcataagttagatcctgttataggaagagatgaggaaataagaaggacaataaggattttatcaagaagaaccaagaataatccagtattaataggtgaacctggtgttggtaaaacagcaattattgaaggattagctgaaagaatagttagaggagatgttccggaaggccttaaggataaaattatatttgctttggatatgggatctttgattgctggagctaagtatagaggtgaatttgaagaaagattaaaggcggtattaaaagaagttcaaagcagtgagggtagaatattattattcatagatgaaattcatacaatagttggagctggtaagactgatggggcaatggatgctggtaatttaattaaaccattattagcaagaggagagttacattgtataggtgctacaacttttgatgaatatagaaaatatattgagaaagataaagccttagaaagaagattccaaccagtaattatagatgaacctacagtagaggatacaattgcaatactaagaggattaaaagaaaggtttgaaatccatcacgggattagaattcatgattcagcaatagtagctgctgcaaagctttctgacagatatattcaagatagatatatgcctgataaggcaattgatttaattgatgaagctggagccatgataagatctgagatagattccctcccaacagaacttgatgttataagaagaaagatatttaagttagaaatagaaaaagaagccttatcaaaagagaaagatgagggttcaaaaaataggttagatgacttagagaaagagcttgcaggattaaaagaaaagaatgatgaaatgactgcaaaatataccaaagaaaaagagcaaatcacagctattaaaaccttaaaaagtgagctagatgatgctagaggagaaatagaagtagcgcaaagaaactttgattataataaagttgctgagattcagtatagtaggattcctgctatagaagaaaaaattaagcaaaaagaaattgaactaagagaaaattatgagggagctctattaaaagaggaagtaacagagcaagaggtatctgctgtactttctaaatggactggaattcctgtaactaatttacttgaaggagaaagggaaaaacttttaagactagaagatgatatgagtaatagagttataggacagggtgaggcaatagaagctgtaactaatgcaatactcagggcaagagctgggcttaaagatatcaatagaccaataggatcatttatattcttaggaccaacaggagttggtaaaacggagcttgcaaaaacactagctagaaatttatttgattcagaagaaaatattattagaattgatatgtcggaatatatggagaagcattcagtgtctagattagttggagcgcctccaggatatgtaggttatgatgaaggtggtcagctaacagaagctgtaagaagaaagccatatagcgtaattttatttgatgaaattgaaaaagcgcatgaagatgtgtttaatatattccttcaaatattagatgatggtagattaactgataataagggtaaaactgtagattttaaaaatactataataattatgacttcaaatatcggaagtgaatatttattagaaaatactaatgaagatcacgttgatgaagaaataaaatcaaaagtaatgagtgttttaaaatcaagatttaaaccagaatttttaaatagagtagatgatactataatgtttaaacctttgacagagtctggcattaagaaaattatagatatattcttaagagaagtaagtttaaggctaaaagataaaaatatcgaaatagaagttacagataaagcaaaaacaataatggcaagagaaggttatgatgtggtttatggagcaaggccgttaaaaagatatatacagaacactttagagaatagactcgctaggatgataattaagggtgaactaggctatggatctaaggttgtgattgataataaagatgaagaaataataataaaaccactttagtaaaaaataagttttgtaaaattcctgtagataaatgtgatctataggaatttttttattctttagtgattaagaaaaatccgttagtaactttttagtagttaataggaatggtgacatttgtatgagataatatattttaattcttcataatagttatatatgtaaataataattagaacaagaaaagaggcaacttttagcaagtgcctctttataatttatattctttaaaaaatatttcattttacttgtttagagtctagttaaacttttttcttaattctaaatatagctacaattacaggaactgatattacagcactcactatagcttcaggaactccatttgttaaaccaatggttgcaattgcaataccagcagtttgtgggtttatctttaaaatagcagagtatctttctaaatagaatacgtaagttaaacccaaaacacctatagtgttaattaatgtagcacagattgatgctattgcaatactaatgctttgatttttaaatctctttctaagaagtatatacacatagtatgctacaattccaattaggactctaggaactaatgcaattataggattccaaaatataaatgatgttggaccaggagcagtaaaattttgatacattgagaataaaccaaaaactaatccaactagggatccaactataggtccttcaactatcgcacctataataactggaatatgcattatagtagcttttacaggtggaattggtatgaacccaagcccagttaatcctaagaaaattgaaattgcagaaagcattccgatcattgcaatctgtctaactgaaaatttagatttagtatagcctctttccataaggtacctccgttcttattccttaatatatggatataattcggaaaaatatataatatatacgaatttccgttcagcttctaattgaataccgacatatattattttaccacgttagaaaaaatgttcaattatattttaaaaatataaacttaaatataggaataataattactgtttttatatttaattatatgaatttagaaaaatgttgatcttcgtataaaatatgagtaaattagcaagtctaatttatggatttaatccataaaaatttgaattataagaaataaaatgataatatataaccataacagaaattgaatagtataaaaggctaggggtgccaatttaattggctgagagaagcttatttgctttaactcttttgacctgatgtggctaataccaccgtagggaagcaataaatattttagaagatttataagacttaccttagggtaagtctttttattctctagtaatttattatggaagccaaataagtagatgttctgcccattggtcgtaaaaattatgaaaaaagactgataagaaaataatgagtaaataataagtagatacattaagttttaaaatttatttagattggggatattagtttgaaagttttagtaaatgaaagagaaatagatattgagggagaaattactgcatttgaagttagaaacaagataaaaagtgatgcggatatagttattttaaatggctttccaattaaacaagattattctctaaatgaaggagataaagttactttaatcaagagaggcgaggtgcctaaaaaagaagagttagaggcattaatggtaagtagacatactccaaaggttcacgagaaagttaagaaggcgaagatagctattgctggacttggtggacttggttcaacagtagcattagcgttgggaagagttggagttggacacataaaaataatagattttgatgtggttgaacctagtaatttaaacagacaacaatactttataagacatattggaatgaaaaaatgccatgcattaaaggaaatattgttagaaatcaatccattcataaatatcgaagtagttgatacgtacgtagataaggataacattaaagaattatttgaggatatggatattgtaattgaagcgtttgatggtgcagaaaataaagcaatgatagttagggaagttttacttcagacagaaaaaccaaaggttatttcagcatcaggtatggcgggatattattctaataatttaataatcagtaaaaaaataaacacaaggctatatatgtgtggagattttaaaaatgaggcaaaagtaaatgaggggttaatggcgcctagagttggtatcgcagcgtgtcatgaagcaaatatggctcttagattaatattaggggaagaggtataaactaaagatgtctgtaattggaataacaaatagaaaactttgtagggatttttttgatcaaataaagaaaatatcagaatctaatctagatttcttaattatacgagaaaaagatttaagcagtgaagagctaatgatgttagttttgaaagtaaaagaggaactgaaaaatacaaatatcagaataatactaaattccaatatagatattgctaaaaagtccaatgttgatggaattcagttatcatttaatgattttataaatattagtaacaagttatgcacaggaagagcaataaattctaaagaaatggtggataattttcattttagtgggaataaatataaaatatataagatgataggcgtttcaatacatagttgtgaagaaggcatacaagcggctgaattaggagcagactatgttatttatggccatgtgtttgaaactgattgtaaaaaagggcttcctcctagagggattaaggaaatagaggttctttccaagaagattaacattcccatcatcggaataggcggaataaatcaagataattataagaaagtattggatgctggagcaagtggaattgctataatgtctagtttaatgaaagacaaaaatcctgaagaattagtgaaatctctttctaaataaacattacgttgatatatgaaaatcaaagtacgaatacgaacaattaaaatcagctaatattaaaaactaaaaacacttgtaaatcttaagtgttcattataaactctttaaagaaagatatattcaagaataattagtatctatgatctggatgctattaagataataaggagaaatgaaataatgagtacaattgcaggaaaaggttgtccaagaattataccagatggagaaaaaaagccattagaagagattgaaaaagctataatcaaaagctatagaaagcatatttggtcaaaatttgttaaggcaattaaagaatataatttaattcaagaaggagataaaattgctgttggaatttctggaggaaaagatagtatacttatggcaaaactatttcaggagttgcaaagacatggtcaagttaaatttgaattagtatttttagctatggatccagggtatcatccagatataaaaaatttactaatagaaaattgtgagcatctaaatattccaattcatatgtatgaatcaggcatttttgatgttgttgataaaatggctaaggattacccatgttatttgtgtgcaagaatgagaagaggctctctttatgcaaaagcaaaagaatttggatgtaacaaacttgcgttggggcatcattataatgatgtaattgaaacaactatgctaaacattttatatggtggtaattttaaaacaatgttgcctaaattaaaagccaaaaactttgaaggtttagaattaattaggcctatgtattttatagaggaagagtatataaaaagatttataaattatagtggtatatggccattgaattgcgcttgtatggttgcagctgaaagaataggtaataagagatatgaaataaaagatcttattaaagaattaaagaagaatttcagtggagttgaaaaatctatctttaaagcagctgaaaatgttagtatggattcaatattaggttggcaaaaaggtgaagaaaagcattcttttctagattattacgatgaagagtagacttaagtaactaaaagtatttattaatttggaaatgtatgttatgctataattaaccatataccaatagatgaaaaggaagagtagagatggaaaataatcctatggggatcagtgatccaaacatattgttaagtgtaataaacatgaaattaagagatcaatatgggtcattagatattctttgtgatgatttagaattatctaaagacgatattataaatatattaataaatatcggatataaatacgatgaagaagaaaatcaatttaagaattagagtcttaataaataattattcataaagttaggaaggtgatgttatatgaatttaaaaaagacaggcaaattaattactgttatagcagcaacagcagctttaatagcatcattagcaaatgataagaaatctaaagattctaacaaacaggaatagtacaaattagagaattatgtgaaggattgtatatatatgattagggaggaacttcaattaaatcatgaggaaatatttgattctatagcaattttgggcgttaatataatttggaatcaatcagagcttaaattaataattgatgatacaatgaaaagtttttttgaagagtatgatactaagaatgaaactttagatcaatttataaattttgttggtgaagaagataaacaaaatgttttaagctttttctctcaagatttaaagagacactatataaatagagaacaaatgcagctacaatataagatggaaagtcctaggggtaacattgttgagtttattcttgtcgggaagtcaattaaaagtaatgaacagtattattttactggaactagttattgttttaaagacttagagaatgaatatggtgacatagattctttgatgaaaaattggaaagaatctatggtcaataaaacaatagattcaataattcatagtgatagaattacaggtctacctaataaatattttttcaagaacacagtagccaaaatgttacaaaatgttgttaataataatactagagccgcgatgcttataatagatttagataattttaaatatgtaaacgactcctacgggcatgattttggagatttagtgttaaaagaagtgggctataatatagtcgaatctgttacagaagatatattagtatcaagatatagcggtaatacttttctattatttaagccaaatataattgatatacaagaaattataactttaggtaatgctatagcaaagtcttttgaaaaacctaatatagtgaatggaagaaaaatatacttaacagcaagtattggtgtttctctatctccagatcacggaatagattataatacattacttaaaaatgcagatgcagcaatgtatgaagcaaagaaaaatggtaaaaacgagtgtgatttttttgatgatagcctttctgatgagctaaacagagtttatagtttgcagaaagggttaagaactgcactacataataatgaattatatgttatgtttcaacctaaagtatcacttgatgattctttggtaaatggatttgaagctttagcaagatgggaaagtcgtgaatttggaatggtaagcccggcggagtttattccgatcgcagaaagttctaaaatgataattccaattggaagttttgttttggaagaagtattcaaaaagacgaaatgtcttttaaacgagggaaatgataattttaagatagcagttaatttgtctgaaatgcagctcagagaagacgttgttttatcagattttaaaaaactaataaagaaatataaaattcatcccaagtatatagaagtagaaataacagaaagtatgctaatgaaatcatttgatagaaatgtgaagattcttcaagagataaaaaaattaggagtaagcattgctttagatgattttgggacgggatactcttcgcttaactatttaacaaaattacctatagatgtgttaaagatagataggagttttgtaattgatttgatgaacaatcctaagagtaaatgcattgtagaaaatataataaatttatcacatcaattagggatagaagtagtggcagaaggggttgaagaaaaatcgcaagttgaatatttaagaacaatattatgtgatgttgttcaaggatactatttcagtaaacctagaatgtttgacgcaattaagaacataattggtaaggaaattttataaaagtgttgacaaacactatctgaggatataatataagattataaaataaatcctatgaagagggatagtaatcatataacaatgttaaagagagctgaaggtggtgagatttcagcacggtagttaatgatgaatgggcctttgaggagcgagatgaaatcttttgagagtagtttagccgtaagtcgcacgttatagcgaataagatatgtttgtatctgaaatgagaggcattttatgcaatctaggtggcaacgcggataatatccgtcctattaattataggacggtttttttatattcttttttagtagttgttaaccaaaagactctattttttgaagaataacaaagtaatatatttaaatattggggcgtgataagtatgttgtgaaagaaagtggtttcaacttaaaaataaaataagcaaagattaacaagggggattttcattatgaatacaaagaaaatggcaacaaatgcaattttaatagcaataggagcaatattacaccaggttacaccaccattcggtatgcaggcggatttctcattggcaatgttatttataataatagtatttaataaagattataaaacaacattaatatgtgggattattatgggagtgtttgcagcactaacaactaaaacaccaggaggacaattaccaaatattatagataaatttataacttgtaatgtcatgtacttgatattgatgcctttaagaaataaagttaataagttagtacaaatatcaatattattacctttaggaactttagtgagcggaacagcatttttaactttactagctacaatagtaggattacctggaggattatcgtttaatgtactttttatatcagtagttgttccaacaataatagtaaatacaatatcaggaattgtaatgtttaagattgttgaaaagattacatcagtaaatggaagctatgcggtagaatagatattttgtataaaataaagaagctatttcaaaagtattaattttgagatagcttctttatttttttagttattattttttcatgaaatgatattcttcaggagtattttcatctattactttaaattcatagccattatctttataatacttaattatactaggtagagctttggctgaatttttactcatatatgcacaatgcatcaagagtactacacgttctttgtcacttttggaatttttaataaaggtacttggactagcgttaggatgagctccatcaccactatctgtattccaatcgtaaatttttaggttattttgatgaagtaaatcaaccatagattgtgaaattctatagcagttattattacaaccgaaaggaaatcttagtatagttggcttaatgccaactatagaattaaccatttgttgggtatccaacatttcttttagaaattcttcattagagttataaagattgtttcgattatgactcatactatgaagtccgagcgcatgcccttcatcatacattcttttaattaaatcctcttgtcctttgatttgacttcctattaagaaaaaggttgcaggaacagattcttgtttcaatatatccaacacattagtagttacttttccagctggaccatcatcgaaagttagatatattatttttttttcatcagcaaggaccttatgaataagaagattttgataattaattatagttattataatcaaaacaaaaggaatgtatttctttagcgattttagattcatattatcaccttcctaaatgtttttacaaaaagtattatgtcctaaaattaaatttatattataagcctttatatacttgtggttacaatatatttacaaagatataatcatagaaatatgaatttatgtaaaaaagtagataattaattgaattagatataatagtgtttggggttatgctaaaatatggtataattttaaatagattggtaaacttcaagttagtgaagaaaagggatgaattaaaattgagaaatgtaaataataaatatttaatagagcatgagatagttattgaagagaatttttcaaattatattgttacagacatagaaagagacgcaagatatgttctatgtattttgaaaaatggctttacatatgagaaaacaagagaatatttattgagtaaatttaagactattaaaaatcttaattttgagaacgttactaacattataaatattgaaataatttatagtattaatgggataaagcttgatactcctcaatatgggtatttaatggagtatgtagaggataaactggatacacaaaattattttaataaatgtaactttcataagaaattagatacattcatggagatttgtgctactatcaatactctaaacatgcagggatatatatatgatgatattagtataaaggatgtaatattaattcctgattccaacaataatgtgaaagtcaaaatgaaagatttgttagcaaatgaattaagaaagtttaatttaataaattcattaccttaccaatataacatcgaaacaagggaagatataaattctaataaagataatgttgtacaagttgtagagctgtgcaggcaaatattcacagaatcagaacttgaaacaggatttaaaggattagaagatattaaaaatatatataatagagtgaataccataaataaatcgtttaaacttaaatatttcatacagaatataaacaaaaaaatgaagaaaaactatagattgtttattagtgaggctttaaataagattaaaacggatttagatataataggaatgacagaagaaataaaaatagtggaaaaaaattttcagagtatattggaaaataagcagagaaataagtttataaatttcaatggtgaggatggaagcggaaaaaccagacttttagaagaaattaaatatagatttgaaaataaatacttcaaagacattatatatattgatgattttaataataaaaatgcgagtgacgaagagaaatataatacaatactaaattacattttaaataaaatagataagaatttgagagataagtatgaaatttatataaaaaaatttatttctatattatttgagaaaaattctataaatggtgaaaataataaacaaaagcttcaattgattaatagaatggggaagttcataagtgagtatacaatgactaagccatttataatgataatagatgatttagataagaaaaatgaagttttcaaactgtttattaaatatataatctttttaagaaataacttagaaaatgttatgataatattttctatgaatgaaagcagtattgatgaaaatttcatgaagttcataaatgaactaaaacaagtagagaagtacgaagaatataaaataaattactttaatcaatataatactactaagatgattagaggtatgcttaatacaggtactgatgtaaataagttagcggtaaagatatattcagaaacactagggaatccgcagtatataagtggagttataaatgaattatatgataatggaaccttatattttgatagtgataatggagaatggaagactaatattaaggttcaagatatacttatacccaaatctctagaaagaagattagaggcaagtattttttcattaaacgaaaaagaaattagtattttaaaggagttagctatatttaaaactcctttatcagaaaaaataattttagaatatgtaataatggattctaataatgtagaaatttataagaatttaaaatcaaaaggtcttttgactgataaaataagtgatcaaggtatacttataggttttaggaataatttattaagaaatatattgtatttaaagctaagtgaagaagaaagaagtaaactacactctaaggcatctatttttatggaaaagattttacttgagacagattattatatagaagagttattgctacatttagagaaaagtaatagttacgaaaaagcatatttttatacattaaaatacgcagaagctcaagatctgttaggagatatatcgaagtcaatatcatattataagaaagtattaacatatcctagtgattcaagtggaagtgaagtggcaattaagattgcaaagctttatgaaaaaaaatctaaccatgaaaaaagttttgaatattttgaaaaggcaaatcaaatagcaatacagaatgacgaaattgaaattgaaatatatacactgcttgaaatgataataataaaaattaatagtattacagatatagatacaggaatagattattctttaaattgtgtacgaagattgctagataaagaacactatcctaagggagaggtttattattactatgcactttcattaaaatatagattagaatataataataaattaacgttgcttaatgcacaaaaagcaataattatatgtgaagaaaataagataaaagaggatgtatatggctggtcagtaagcatccttattagcatatatataaagaaggggaattataaagaggctaaaaatttatgtttatatgcaaacggtatatttattaataacaataatattaatggtcaactatatatcaaactattagatgcatctatatctaaggaagaaggaaaagataacaaggaaattttagagcaatatttagaaatagctagagaagggaataaacagaaagtatacaagagggaaatattaagtctgatttgcatagcagatatttatagtcaggaaaaaagatattcagaagcagagaaatatctattaagagcgctagaaagagaaagagaagaggggatagactcttattcatttaatatttgcaatgaactttgtttgttatatataaaatcaggaaggataagtctggtagtaaagtatcataatttaataacgcaaatgcaaaaaggattaaaactattggaagatagaattataaatacaaactatacatatgctttatataatctgatgatttgtaattatgatttagcatatgaccacttgaaaaaaatatatgctctaatatttaatagcaatagttctaagtataaaatagttgtttgtaattactttgagcttattttatataaatgcaaaaatgagagtgatataagaaatgtatacaataggttagagaaaaaaattaatctattacaggatgtagatacatgtcttgaaataagaataagcgctattagaagaattttaacacttggatataaggtgttggctaaagaattattccttgatctcaagggatatcctaaaaattacaatgttgaaggaatttatgtatatctagaacttaattttagaaatagaaatcaatataattttctgataaataaggcgctaagagtatgctcctttgtggataatcaggaaattaaagctgatatatattctgcgattggtgagaagtataatgaacttgaatgtaatgcattggcattgaattattattatgaatctatagctttatatatagatacaataaatttattaccacaaaatgataagttatcatatgcaaataatagcaggtttttagaaacccgtaagttatttgtaaaatgcttaaatgaagatttgggtataaatatgagttttaaatcaacacaatttatacaaacaattgaggatttagagcaaatattaaaagagctagatttaatgaatatactagataatgaagatacattcaaattggttcaacatttatatgaaaaatgctattacaatgattttagagatatatataaagtatttgagaagttttctaataatactattgatgatataaaaaatgtgatgaagtatatggctagattaattttggcagataaggccatgattgttacagagaacgagcagggagaaaatgatgttatatgcacatatagaattagcgataaaaatgaaataaatagatacctctcactaaaagttgattcagatgaagatacattcgcaatttgcagtaatgaccctagattctatcagctagatgataaagtactaaaagatggaataagatcttgtatgtatatgaaaataataaatagagaaaaacacataaatagtagtgcaggaattaatgcaagattaatttttattactaataacgcattaaattatataaataatgaatcaaagaaaacaatagagaaatttaaacctttcttaacctttttattagaaaagtataatcttacaataagctctacactagacaagctaacaggtgtttataatagaaaatattttgaagaagcgttactttttttattagattctgcgaaggcaagagaaagtgaatttgctgtaataatgtttgatatcgacgattttaaaggagtaaatgacaagtatggacatcaaactggagatgaagtcttagttaaggttgcaaatgaagttaaaaagtgcatgagcaaaggtgatattattggaagatatggaggagaggaatttataattctcttgcctaatgttaattatgaagtagctataagtttaggggagagaataagaaaaaatatagaggaagcgaggattctaggagataaaagaaaaattaccgtaagcataggaatagcaatgagttcttatgaatctcttaacaatgaagaaattataaggcgagctgaccaggctctatataaggctaaacgtgatggtaagaatagatgcattgtttgggaaaatgagtgcggagcaagtggaaatacaaatgacgaattaactggagtattatcaggaaatgcggctaaagattataattttatgttaatgctcaaagaaatagctggtattaccaaacgtagatgtagtaaggaagaaaagatttataaccttattttaaagattatgcagacgattgagtgtgatatagctacaatttttattgtaaaagagaagaaaatagttaatacgtatagtaagagaagaaataaggataattggaatttagatgataggtttaattttaaattagtaaatcaagttattgaggaagaaaaaggtttatatttagttgattgggaaagcatggacagtcacaatagttatgggcttccagattggaaatcagtctgtatagctccaataatttgtaacggagaattattggcagtcgtatacctttcaatttcagtaaatgagaaagaatttatttgcaatgactataatgtgctgaatttcttaatagaaataggaagttccatttttcttggttaaattaacaatacattttagaatgttttcaattcataatcacataaaagcttttttatcatattatataaagagaaccaatttttaagaggagctttttatgagtgatactgttcctagaaattatgaaaaagaaaatattaatgatatagtatctgtagaaaataataccaattatacatttgaaatatccgatgataataaggagaaaagagataataaagagttcatattaaataagaaagctgcaagtccccaaaaagtagacgaaaaagattgcaatggaggggaaattattgttacatcaattttggaatgtgaagaacacgaatatttaaaaggtgtaaaaattaatttatataaaataaatggattatctcctgttcttgttaaatcgaaagttaccgatgaggaaggaaaagttattttttctggagttgaggaaggctgttataggataattgagattattgataaaagatactttgaaaaacctaagtatataaattggaacgaaataataatagataatactaataagaaacaaaaaatagtagtagttaataaatttaaaaaacttatggcacaaaacaaatataagaattaaataaggaatgaaggttatatttaagaaataaattaatttattcgtaaatataaccttttgcatatgtttaattaagtaataaaaattatatgatactctaatttggagaaaagaagtggatttttgtattcgaaaattatataatcataatattatataatctttaagtaggtgttaaaatggataactatattttaaaaataaaaaaaattgatgacaaagctgtaatgcctaattacgctcatgaaggtgatgctggattagatctatacgcagtaaaagaattaactttaaagccaggagaaagaggattagtacatacaggaatacaaattgaactgcctaagaatactgaagctcaaataagaccaagaagcggtcttgcattaaaaaatggtataactacgttaaattcgccaggtactatagatgaaggatataggggcgaaataggagtgattctaattaatcatggaagcgaaattttcaaagtggaagcaggaatgaaaatagctcaaatggttataaaacctgtagttaaagttgacataatagaaatagaagaattatctgaaagtgaaagaaatcagaatggctttggttcatcgggaacaaggtaaatcgacaggtattgagagatacctgtctttacttatcaattaaactaattttagagatacattaaacctgcatggattataatatccatcagttattttccagtctttaaagtcatttttatcataaagtaagtgctcttttctgtgtgaagtaataggaaggtctccgataaatatagcctctttagcaactctttttaattctgaaattgcttgtttagcatactcttgattaggaaaatagtgaaatgctccaaagcaaaatactttatcaaaagttttatctttaaagattagattatttgcctctccatgaagaactgaattgttaagtaattctatgtgcctttttacaagagaagaggaataatctactcctacatattcgccacattttatatattgagctaatccacctgctccgcaggcaacctctaatattctatcggtttccttaatgcctaactctttaacaatttgtttagctatttcttttacatcagcagtagtatcttcgtatccgtctaattcctctaaacatgtagtatttccatttccttttctttcccaaacttctttccaataagacatatcttccataattctctcctcctgaaatttattaaattgaataaaaataaaaatgttttattcatataagtgagttcaattattgaacgatattatactaacattgttcaatgttcagtacaataagttcatgcagaatttgccatggtcttgcaaaataggaagatgcaatggaaaagtagaaggtaagaatagggtactgagattgaaggtgaaatatttttaggaataaaaatatggcaaattgcaataacaaattgaactaatttctatttatgacttaaacacttgtattttcttaaactgcgtaaattttatctaagtgtgcctcaaataactcttcaggagtcttatagttaagtattctcctcggaagagtattcatccattcttctatgaaagcaatgtcatcagaagtgtagtctgaaatacgtttaccctttgggataaagcgacgtattagaccattatgacgctcattagtacctttttcaaaagatgaatatgggtgagtgaaatacacctttgtatcagtttcaatttcaagtgtggataagttagcaaactcagagccattatcaccagttatagtcttgaaagcttggctaaattgcttgccaaataaactgcgcactctattaagagcatcagcaacggcttcagcggtttttgctataatatcgattaccatagcatatctagttttacgctctactattgtaagtagtacattatcattattagatttttgaccaataacagtgtcaatttcccaatgaccaaactcgtgccgagtgtttatctctactgggcgatctgatatgctagaaccaagttttttcttatgctttttaactctagtagattttgtatttctacgtagcttcattggtaagtcagtgttttttatatctaataaaccaagatctatatggttatataatgtttttgtgcagaccatttgagaacgcttaaatctaccgttagcgatagcttcgccaacacaagcatctggtgaccatgaatgatttttaattttatccacagtatagtttatgaaatcactgcattctaagcgcttaaaagtgcggcagcagtttatacgatgctttttatatatggcttcgccagtatcggcaaggtatacttcaacgtatttttcttgtttaatttgagtggtagttccacgtctaatttcatttaagatagtgtttataggtcgttttaactcttttgctatcttataaggtgaaaagccatcttttagacgaagctggataagcatacgttcttcaaaattcaaatgtttatttttacgtgattctgtgttattatttgggtagtccatagtgattatcctccgtgtatgttttttgtttagcgattaaatcataacacagaataatccactatggattttttattagttcaatttcattttacaacaggtcggaataaaaatatatatgaaattcatcaaattagaataaatatataattataaattaatttgaatatatatttaatctaatttaaattttagatgtagaaaaatactgatttctgtattactgtatgaaatcatatttgaacctaaattaatatttataattatagtaaagaaaaagtatcctattaatagttacttattaagggacttttttataataatcatctaattaatattggaaaaatatttttacaaattatgcttattaacgacttgaagatgaataaatatatgttgaaaattagcaaataagggactataatatatttaacatatagaaaaatatataaaaagagagataaatatggtaaagagtatttcaaaaaaaattataaatagtatatcaacaaatgataattatagtaaagaccaactagaacaaatggaatatattctagttagtattttatttgagacgataaagctattttctgttatagttatattttcattgtttggatatttcgacaaaattattataattttagcagtcatgagtatgactaagatttttataggcggataccatgaagatactcaggttaagtgttttatagccacagtgctattagcaattggaatattggtgttaaattctcagtgtactctctcatttataggtaactgtatactaattatcttaagtatattttgcctatggcatcaagttccaataataaatcctaaaatgccaattacgcgccaagaattaataagtaaaaacagaataagaggtctaagtattgcaataatacttggtataacatctatatgtctgtacaattttagcaactattattcacttataacatggacaatcctatttaacaccatattaatgtttaataaaaaagatgcctaagattttgaaatattaatgataaattttaagcaaaattgaaaggagagtggattttatgaaaattaaaaatttattaggtaaggtattaatgatgttatcactttcaatgattatatttgctccagcatcagcagctacagcaggagttgaagaaatgcctgaatctatgaaaaaattgagatagtcactttcacataaatttaaggaggaatttttggtgcgtttattggcagacataatagtctctatgattcaagctataatttttgcgtatacaacggaatgctgcttgaagagtgaagataaattaagcaaacttaaagtagttttaataaccatagttacttttattataaacagtagctttacaagtatatttggaaacatatctatctgtgtgtttataatacatacatcatgtttaattgtaatgattttctcatataaagataacaaactaaagtcaatgattccctatacattgacatattcttttatgggagtatatggaattatatcatataatttattttttggttttatagaaggtctgataccggtagaatatgcagatatagctaatattttgattatatatgttccttatattttattcttatacttatgtataaaatacatggacaagtttatagagatgtacaagctagcagttagtgaaaagattaatatgattgtgattataacaataagcttctgtctagatttcgttttggccttttatttaataatttataatgatgaatctaaaatgttaaaaaatatgataatcacaattttgtgcgtatttttagcgtttatcataaaatattttgcaaatataaagaagaaatcagatcaaatatttaaattaaatgaagctctagaagaaaaaaatagtgagcttaggaaaattaagcatgactacggagcacagatatcgtatttatatggactatgtctaatggaaagattcgatgatttgaaaaagtcgctaaaagatattataaataagaatgactctacgccaacagctgtagaagttagcgagaatagaaattctatattatcccttgcattaaaaccggctattgatatgggaatacatgtaataatagaagaaaattgtgatttctctttagtgagtattactgaaatggagttttatagaatagtatctaatatagtaaataatgcaataaaagcaatgaacggcaaaggtataataattgcaaaggcttatgaatatttaggaaatgtaatagtgagaatagagaataatggtcctagaattccagaacaacatctgaatgatatatttaaagttgggtttactacaaaggaaaatagtgatcaaagtcatggatacgggttaagtattgtaaaggatttagtagagagtcataatggtaagatatatgtaaaaagtagcgatgtagttactgaatttaaaatagtatttcctataaagaattttgtataatatttagtatacataacgaatatttccccagaaatattatttaagatcgaattgaagtacatattaaatataaataagatttcaatggtgatgataaatctttataaaattaaggtttattgtcattttttattgagtttttatagttagaaatctttatatcaggtcttttgttatgagaaacttaatatagatacaagttataaattgaagaggtacagggatatcattagaaaatgctcgaaaattatcagtattaagtagtaacataagtcatatagataagtagaaatatatgagaattcataaaaagtattttaaaaattcagaataatagtgtaaactatatattaagtgataaaacttaacataattaaaaggggtgcgatggcatgtataaaatagtgaacaaaaaggagctaacaaataatatattctcaatggatatagaggctccaagagtagcaaaatctgcaaagcctggacaatttattatcataaaaaatgatgaaaaaggtgaaagaatacctttgactatagcagattatgatcaggaaaaaggaacagtaactatagtttttcaaactgtaggaaaaggaacaaaacagttagctgcttttaatgaaggggatcatgtagctgactttgttggaccattaggtgtaccaagtgaatttatatatgatgatatagaagaattaaagaaaaagaatttcatctttgtggcaggtggagttggtgcagcaccagtttacccacaagtaaaatggatgcatgaacatggaatagctgtagatgttattttaggaagcagaaacaaagatttattaatatatgaagaaaagttaaagaatgctgctggaaatctttatgtaacaactgatgatggttcatatgaattcaagggaactgggtcagatatgcttaaagagctagttaataatcaaggtaagaaatatgatcatgcaattattattggaccaatgataatgatgaaatttacttctatgctaactaaggaattaggaattccaacaacagtaagcttaaatccaataatggttgatggtacaggtatgtgtggtgcttgtagagttactgttggaggagaagttaagtttgcttgtgttgatggaccagaatttgatggacatttagtaaattacgatgaatcaatgagaagacaagctatgtataaaacagaagaaggaaaagcacagttagaagttgaagaaggaaatactcatagtcacggtggctgtggttgcagaggtgataaataatggacatgaatgagagattagttagaataccagtaagagaacaagacccaaaggttagagcagcaaactttgaagaagtttgtcttggatataacgaagaagaagcaactaaggaagcttctagatgtttaaactgtaagaatcctaaatgtgtagaaggatgtccagtatcaatcaatataccaggattcatttcttatgttaaagatgaaaaatttgaagaagctgcaaaagaaatttcaaaatacagctcacttccagcagtttgtggaagagtatgtccacaagaaaagcaatgtgaaggaagatgtgttttaggaataaaaggtgactcagtgtctattggtaaacttgaaagatttacagcagactgggcagcgtcacataatgttgatttaagtgcaacagaacctaaaaatggaattaaagttgcagttataggaagtggacctgcaggacttacttgtgctggagatttagctaaaaaaggatatgaagtaactatctttgaagcacttcataaagcaggcggagttttggaatatggaattccagaattcagacttccaaaagaaaaagtagttaaaaatgaagttgaaaacattaagaaacttggtgttaaaatagaaactaatgttatagttggcagaactataaccatagatcaattgtttgaagacgaaggattcaaagctgtatttataggctcaggtgcaggacttccaagattcatgggaataccaggggaaaatgcaaatggagtatgctcagcaaatgaatttttaacaagagtaaacttaatgaaagcagcagtagaaggatacgacactccagttagatctggtaaaaaagttgcagtagtaggtggaggaaatgttgctatggacgcagcaagaactgccttaagacttggatctgaaagtcatatcgtttatagaagaggtgaatcagaacttccagcaagagtagaagaagtacatcatgctaaggaagaaggagtaatctttgatgtattaactaatccaacagaaatcttagtagatgaaaatggatgggttaaaggaatgaaatgtgtaagaatggaacttggagaaccagatgcatcaggaagaagaagtccagttgaagttcctggttcagaatttgttatggatgtagacactgtaataatgtcacttggaacatcaccaaatccattaatttcatcaacaactcaaggattagaaataaataagagaaggtgtatcgtagctgaagaagaaacaggtcttactactaaagaagcagtttatgctggtggagatgcagttacaggagcagcaacagtaatacttgctatgggtgctggtaaaaaagcagcaaaagctatagatgaatatctacaaaaaaagtaagatatttattagatttcagtaataataagatatatacttaagttaatattttatataaaatcagaggatatttgttccaagggctaaaaataaaagccattagaacaaatatccttttttatactgaaatgtaaattaaattgttttatatacaatgaattaatatggtggaagatgaatgaaaatgaatttttcttttgacaaaatgaatggtagatagtaaaatggttttatgtttgtacatgtgcatattatttaagattatatatagaaaattatataataaaaagtgatacataattatatctattttatgtttattcagtttatatgtagcaataaattataataaaaaaggaagaaataatatgaataaagcaatgaacttattaaaaagaattattttattttttgttggaatgagtataattcagtttggtgtagcattatttttgaagactaatattggctctgatccatttactgtatttacgcaaggtttagcgtttgcattagataaaacaggattaaagaatgtttctgtagttaagatgataagtggagcagatcaggtaacgccaggggtagcaaatatgattatattgattgtactatttgctgttatactcttagttgagagatcgcgtataaagataggaactttaatttgtgttgtaggagtaggaccaattatagatcttggagtgaaagttgtttcgtatttcccagttgaatcttataactattttataaaggcattattggttatatttggatgtttgataattgcaatagggtttgcagttttatcggcaacaaacgtaggagttgccccaaatgatattgttccatttataatacaagataagactaaggtacaataccgttggattagaataacactagatgctggatttttaataataggatttatattaggaggaaaagttggtcttggtactgtgatagcaatgataacaactggaccatttatacaattctgcctcccttatggagaaaagtttgtaaacttattagtaaatgaaaaagatgtagatgcagaagaaagtgttacagctactgcatagttaatttataaaaataggagtaaagctatgatattattgattagcttagtctaaaagaatagaaatataataaaaaacagaggtttataagcaacctctgttttttattatatattaatcaagttgaaggattggtataacgtaattatgaattagaattattgggatacagaatagttgtaattaactgagctgttgctatcccatgttcctgaatcatttttaaatgccatatttaaagcataagcaccagatggaatagttatagttgcggcccatctaccatcagattgtttagccattgtaacatcagttggatttgtaaaatcattatatccccaatgtaaaattactgaagttgaatttgctgctaagtttccattgtagtatacagtggttattttactagctgttggcgctggattaacttgtactggcacagatgatgaagaaacttgtaagtgccaatctttgctggagttattatcccagttagatccgttagtaaaatcaaaatctagttttgtagctgatgaaggaatttttatagttgctgcccagaatccatctgaacctttagtcattgtaacatctgatggatttaagaatccattatatccccagtggagtttaatcgaactagaatttgctaaagaaccattatagtataaagtaaaactgttaccttgtagtaaagcgctgctatcataatcaactttatagcctgaatgaggagtataagtagaaggtacaggagcaggcgtaggtattgagccatcattgtaaagaacaattaccgaattagcaggaatatttcctgaaattgttccgtttgaaaccgttaaagtacaattagcactacccttattagtataaatgccatttgctaaattagtaggagagttaatagaagtgcttccaccatcgtttactattacagtaccatctgttcctctatctattaacatagttgtattattgtttgtccacctaatatattcattttttcctaccattgcattatggaatttattgattgctactatgtcagaatctttccaaagagcatcaccctcagatccaatattgccagtaggtctgtcgaagaataaaggtgtagcgcttgcacgagcggcagctatagcccagccaagttttctttgagtatctgtcaagttcttacttgatccatcttcataagtatcatgagtttcaacaaaatcgactgccttagatgagtcaacaccacccaaagtagtgccaagtgaacttaaatttgttgaagtaactgcgcttcttactgctcctccataattacttgcagtaacattcatgaatgattcgtaagcactaacattatctactgaaccgtcttgtagaatttcgccataaataaataagttagatttattgtgcagattgcctagaacattgctccagtagtttccagcccaagattgattagagtctagtccaatgttagtttcaatatgtttagcagcatcaaaacggaatccgtcagcaccagcatctatacattgattcaaaaatgttattgctttgttttggacagtggaattttgagtatttaaatctggcatgcctatacctttttgtgttacatcatatctgctagtccaattattacattgtccttgattgtgatataagctagaatcttggaagctaggatctacacttggatccagttggtctttatttccattgttagccatatgattcattactacatctacaacaattgaaatgccatatttatcagcctcagtacaaagtgctttaaaatcatcgtagcttccaagctgcgcattacccacagattgattggttggctgatataataaccaccattgacttggatctttacttgaactttttgttccttgtacaggagaaacctgaaccgatttatatcctgctgccgctatgtttggtagttcattctttatagttgcaaaagaccaatcaaaggcatgaagaatagctccatctttagtattagatgggaggctagtactactagcggcataagctttagttaaaatttcgtttgatccaaagcttggtattgaaattggaagtaagtttaaacttaaaaataaacctgaagcaattaatcttgatattattttttttctcattgatacacactccttactgtaacgcaatcgattgcaagaaaatgcagcaatcctttatttatttgtttgcacatgcaaagtagtaattattccccctctctatgaagtattagtcactaataaaataatgcgtaactagggcttttattttgcatacattgcaatcggttgcacgaaacttaaaaaatttttatccttgaatatatcaaactgcataaatttttacactaaccaaaaaatatttttggtaattatatgcaatttatgtaaacattataccatatatgtcataaaattcaatagggaaatttaattataaaaattatctaatatagcatatagttctaacgctacattctgatgtttctatatcattatattatttgaatttaattaattataaattaacaagttgaatacagtatcttaatcactaaacaatagagtaagaaatgtagtaattatatagcgaatattgaaatatattttgatatggtgtaaaattattacaaataatgaaataagtcgataaaaaatgaccagagtttataatggagaataactatgaatctataattgcaggattattttatttaaattaatttctgtacgaaaaattggggatatattattaaaaaaaggaagtgttataatgaaaattcttattaatttaagtgttaagaagaaacttgttttagtgttctttgtgatttgtattcttatagccgcaatagggacagaagggattttaagttctgcaaaaataaatgataatgcagaggtcttgtatagaaataatttaacatccattaaagacttaggggaaataaagggaaatatcaatgatatgagagctacatataatagattagttttcgaaagagataaaacaaaactagatgattatttaaaggttataaataatttggacataaaaaatgataacggtatgaaggactacgaaagtgtaattacattatcagaagaaaaacaaacttataatgatttgaaaaatgatttagccaaatatatagaagtaagagataaagcaattgaattcgcgaaaaacgggaattatgacgaagcaattaaaattagtaattctgatctaactacaattaaaaattctttacttgaaaatattcaaaaaagcattgatgcgaatgcaaaagctgcggagcaagctaatttaaacagtatcgctcaatttaagagtgttcgatatactatattaatttttacaacaggagcatttttaatcattctttttatggcatatatgttaagtaagaatatattgaatccattaagagagataaaggacttcgcaaaaagattatcaacatatgattttgcaactgcaattacaattacaaggggagatgagtttggacaaacaggtgtggctttaaacactgcgcaagaaaatgtaagtagcttagttaaagtaattatggaaaactctcaggatttaagtgcaagctcagaagaactttcagcaacagttgaagaaatatcttcaaaggccaacaccatagatcaagcagtagataatattgcctctgcaatgcaagaatctagcgcgactactgaggaaataagtgcatctattgaagaagtagattcaagtattaatgtactttcttctaaagctatggaaggaagtaataatgcaagtgagtccaagaaaaaatctatggaagttaaaactaatagtcaaaaagctattagtgaaactagagaattatatattgaaaagcaggaaaaaatgcaaaaagccatcgaagatggaaaagtagtagagagtataaaagttatggcagaaacaattggaggcatagcggaacaaacaaatttacttgcattaaatgctgcaatagaagctgcaagagctggagaacaaggaaagggatttgctgtagtagccgaagaggtaagaaaacttgcggagcaatcatctgatgcagtaataaatattcaagatacaattaataaggttcagttggcatttaatagtagcatcaacacaggcagtgatatattagagtttataagcaaaaatgtagaagaacaatttaatgattatagtgaagtaggtaacaagtactataatgattcaaactttgtaagtaacatgtcagaagaaattgctgctatgtcagaagaaataacagctacagttggacaagttagtgaagcaattcaaaatatggcacaaacatcgcaaaaatcaagtgaaggagctgaaatgataaaagatagtatgaatgaaacaacaaaagctattgaacaagtagcgttaactgctcaaagtcaagcagagcttgctcaaaaacttaatgaaatggtacaaaaatttaagatatagtaatacttattaactttaagaagggatagactttaggagttaaatgaaaaatacaaactaatgatatgattatttataaaataaaactaggacaatagatggtgaatcatataaaacatagagtgatgttgaaaataaattatcactttatgtttttttgattaagagaagttcatataaaaatatatcgtaaaaaatatttttttaatatgttatatttcatacaatatagcatattaaaaaaacaaatggatatgatgtaatatgttgaaagcagatgaaataagtgtaataatgtaatggggatattttatctttaattgactaattgggaaaattagttaatattaataaaaaatgataagataagtaggatttttagttaattatgaaaaaatactttaactatgtcaaagagggggagttaatatgtcagtaacaaaaggatcagtgatattttatggactagatggtcttgataagaaggttaatgatatcattgaggttttggatttaaaaaaacaatcttttgaagtgaaacttataatatttgaagccgttaataatgcgtatattcatggaaatagtagtgatagcagtaaaccaatttatgttgattgggaattgaaagataatttactaagtgttatagtaaaagattgtgggcaaggatttgagaatataaatttgcataagaaaatagacgaagagaatatattagatgaatcaggtagaggcttgtatattataagttgttatactgatgaactaatcttagacggaagttctataattatgcgtaagagtctttcatgtgacatatagattaatatatatatggttagtaattgatacctaatgaatattgtacatgctagggaggcaactcgatgaaaatttctttaaagataaaacttatgattactttttttatactcatttccttaccaatggggttacttgggtatatatcgtatagaatgtccagcgcatctatacaaacggctgttcaacaacaattaaaggaacagacttacaatacatctaatttaataaataaaactatagattcaacaaaacattctttggaagttgcaagtttgaatggcgatattataaaagcagttgaaaattcaaatacaagcaatctagatacagcatctgaatatataaaagaggtccaagagaaaaataaagattttatggaagtattaattattacagatgcttatggcaaggtaattgtaaacactcagtcaaaagagaatgatatagatttaagtgatagagattatatgaagcaagtgcttagtagcggtaaggaagttgttagtgaagtattaacgtctagatttactggaaatccagctatttttatagcttatccattgaaggaaaatggcaaattgattggtacacttgtaggaagtataaagtttgatagtatatcaagttatgcatctcaaataaaagttggtaaaagtggatatgcatatatgattgataaaaatgggttaattgtttatcatccagattcaagtaaaattctaaaagaaaatgcaaatgataatgcaggagaagatttaaaagttttagttcaggaaatgaaagaaggaaaatcttcagaaggattctatacatatgggaatatatataaatatgttgttttccaacctgttggtaactgggtgattgcagttacagcgcaatatgacgaatatatgtcagcggctttaagtataaggaactatacaataattatttctttaatatcaatcattatagcaatgatatgtgcttatacatattcaacaataggaataattaatccaattaagaaactagagagattaatgagatctgcaggagaaggagatttaactgttaagattgatatacaaagcaaagatgaaattgaggaacttggaaaatcattcaatgaaatgataaagcatcaagataaaatagtaagaaatgtaactaacgcagcagaacagttgaatgcagcatcagaagaaatggcagcttcttcagaagaaataagtgccgcaactgaagaaataagtgctacagttaatcaagtggcgcaagatgcagaaaaacaaaatgaatctatagttgatgtttcaaaagttttagttcagctttcaagtcttgttcaattagctcaaagtagagctaaagctacaagttcaaatgcagctaatacaatgtcagcagctgatcttggaagagaaaaagttgaggaaactgtaaaggcaatggatattataagtaaaggcagtgaagaaacttcgcaggcattagaatctttaagtggattatcgagtaaagtagatggtattataaacataataaattctattgcagagcagactaatcttttagcattgaatgcagctatagaggctgctagagcaggggagcatggaaagggatttagtgtagttgcagatgaggttcgtaaattatccgaagaatcaaatgatagggcaagagagattgctgtactagttagtgaaatggtaaagcaaacacagaatgcggtaatagcaatggaaagatctaagtcagaagtaaacaatggagtaaaaatagtatcagaaacagataaagcatttgtagatataattaatgcaatagaaaatatagttaaacatgtcactgagatacttgatattactggtgatgaagtagcatcatctgataaggtaattgggcttataaatgatatagcaacagtaacagaaagcaatgcgtcaaatagtgaaaatgtatcttcggcagcagaagaacaagctagtgcaattaataatttaacagctacagcacaggaaacaagcgctatggcagaagaattaactaagcttgtagaaagatttaaaatatgaggtgataattgatggaaataaatataccaaaagactttgttgttgatgaagtcgcaaattttagagtaaaagtaaataaattaatagatgaaggacaaaagaattttatattcaattttaatgattgtaattttatagatagtaccggacttggtgcattagtagctgtttataaaaaatgcgctgaaaagaatggaagtataaaattaaaaggactaaagccagaagttgagaagttatttaaattaacaaggttagataaggtatttgaaatttgtccgtaaaaatatctggagtttttatgaagtgaaattcagatagaaaggactttcgattgtatgcgtgagggtaaagaaagtataaaaacattagatgaaagcgtagaaataagtcaaagtaattacaaagaaatttgggacaaggtaaatgagttagtgtttgtaattgagattagcaaggaatttgttccaaagaactttatagattttaataataaagtttgtagtaaattgggttattctagagaggaacttattaaaattttaccttcaaatgttttgaacttaactaatatagaagataagattagtatatttgaaaatttaagtaataagagagtatgcgataaaatagagcttacattaaaagcaaaggatgaaaaacgtatttacgctaaatctaatatatctatatttagtcatgaagaaaaagattttgctttagtaattgcaactgatattactgaatacaaaatattagaagaagagcttaaaggaatattaaatggaatacctgatgtaataaaagtatacaatacagattatactatatctttttttaatgaagcagggtatgagttttataataaaacctcggaagaaataaagggaaaaatgtgttatgaggtgctatctagaaacgaaaaatgcttagattgttcttttgaagaagtagtggcgactaagaaaatgctatcgcgtgaaagatatattccagaattaaataaatttatggatgtatgctataatccggtgttagataaaaatggagaattattatttattgttgagaggcttagagacataacagagaaaaaaatgcttgataaaataactaaagatagcagggaacgatataaacaaataattgataattcgcctgatgctgtaattattatagtagataataaaattgccttagctaataatgaagcctgtaatttgtttgcaacgctttatgatgatttgattgggagtaatgtatatagacattttcaagacaaatataaaaaggctttgcataaagtatttagaaatataatatctgaacgaaaaatgaaagaaatttatgattatgacttctacgttccaaataataagttaataaatgttcaagtttcatatagctacatattatacgaaggtaaccaagccatattggcagcaatacgagatattactgaaatgaagcgagatataaagaaagccgctgagttacaaaggagtacgcttcaaaaagaatttcctgctcaaaattttattgatactatgagtgtttatatgccagcgcataccattagtggggatttctatagaatttatgaaataaacgaagactttattattggaatgataattgatgttagaggtaaggggatatcggcagctctaaatatttctgcatttgatattttgtgctttcaagaagttaataagggtcaccatgatccaatggaaatagtaaaaaatttaaataagaagttagtaaaatattacgaagaaaattatgttgctgtatgttgttttagcatggattttaatagtaatgagcttaaagttgttggagccggaattaatcaatttctttttcaaaaaaaaggagaaagtttagaagagaagattgtagaaggatctttcctaggtatgtttgataatagtgaattttgtgagcaaaccatcttttttgaatcaggagataaaattttcttttttactgatggattagattttattctagaagaggataaagttatacaagaatatatgagggatgcaagcatatttgaatttaagaattacttagatgacttcttaagtgatagtattttagagagtggaaaattaaaagatgattgtacaatggttgcaatagaaataaagtaaattaagatttattgatttatatcaaaggataaaatttataataaatattatcctttgattgttaatttaaaacttaaaatttgtaaaattttttaataaaagtatttaatgattttaagctataattcaggatttattgattgctgattctaactaagtaacaatgtaccagttgacacttagcatctattaagttagaataggttatacaagatgaacatttctttgaaaacaaaatatgttattaaaccatctttaacttgggggcgttttggcttcgacgggggtaagaagggtttgttaagcgagtcgagggacgcatggagcctcgttaataaagtatgcactaaatgtaaacgcagaagataattttgcattagcagcttagtttaatagctgttcatcagcccaggttgcctacggcttggatcactggtgtcattaaagtgggaaacgaagcctagcaaagctttgagctagaggggtattcatgaagctactgagaagtatagcctgtctaagggcgatactttgagggaattttaaaacttagactgcactcggagaaagacaaatcaatctactttcggacacgggttcgacacccgtcgcctccaccataaaatccacgaccatttgtatgtggcttaaatagctgcttacaggtggtcgtgttttttattgttacggggtagcgtaacaataaaaaacacgaaaatctaaaaatccataagttggattttgtggggtgttttaatttgatttaaaattaagataatcagattataacagatatatttcacaaaattgtgagaaaaaatcaaatacttcattaaaaatagctttacttagtgctataattaataagcaaaaataattataaagagaataataagcttggggagaataaataagtagttttataacatcagaagaagctattaataataggtatgacttataatattgaggaagttgttgttagaataaagaattggtttgcaattccttaattgggacaatggcataaaatcaaaactgagagcaaaagtaatgtgtggatttgcgaattatggtaaagaaaagtatagaagaagtagtggatatatgaatttaataaaggtgaggaataggtgatttttatgggcaaatttacaaactttattttaactgccaagaaagtgtttaaatgtgaagatataaccccaaaaattgaatattgttttgaatttgtactcatggatgaagaaatgcgaagtaaaattgttaactttattaaaccaagtcatttcgatcagggttcttatctaaacttaaacgttgcttttggtgttcgtgacagcaaggggaaaatctttcttactcgaagtcgcttcgaaaatcatggattgaactacgaaggcaccggatatattaatgtggatacatacgtagtaattactgagaatgaagttttcaatgcagtctatacaaatgactcagaaagtgtgaaatttaatattccaaatggttgggatgatatcgttatacatgcaattgagtatttctccaacaagaaagaagaggactcttttgaaaaaagacttgctgagaaacaacacggattttctttgctaagactaagaaatcattgcaattcagagatgcttgagaacattaagaaaaaattattcgagtttgagaatcctaatgtaactgaagacagcttgaaggaaaactgtgaaatcaattcagaagaggatgcaaggaagtttcttgttggtaatggttgtaacccttatgctattgaaaagaaatacaatgaggcaactattaaaagatttgaacagtatgcaagcagagaaaataaataccgttgggttagggaagaatatgttcgcattctaagtgagattgctgatggtaacattgctgattttgaaaagaaactaagcaaggcaaattttatctgtaattattggatatctgatgatccctgtgaagagattcgcctcaaagcttaccagaaaattttagagaaagctgaactggttccgagaacgtttataagcattacttctttcatatatttatatttaaacaggttttccgaacgggtagagaaaatagagcctttacttgacttgattgacagttatgtggaaaaccattctgagaagcgatatgggaaaaatggcataccactaattagttataattacaagaaagattcgatctgcttgagaggcatgattgccgaaaggcgcagaacgaaaaacttttatggatttgaatttgttcttactgataatgagtcgattgatagaatcctttcaacatttagcgagtattacgatagtcctgtggaattttattctgaagtagtggaagaactgaatttctcttatggagtaaagactaaagagggtgggatttttttgactggtttgacatatggtgcaaattctattcagaatgttcaatcttttgatatgataagatttgcaataatgattggcgaagagcgaaacgtacttatgctcgattgcgagcgtgatacttccgatggctcaatctgtatacgaagaccatacgaaacgactatgccagttccccaaaattttaatgattaccgcgaaattcttacaaagatgattgctttttaccgtaataaggcccaacgtgatgattttgagaaaaaggtcaaagagcaaaatactgattttaatataaataggtcgatacacaatattccaaaggctatttatgaaaagtataaagataagcttaaaacacaaaaaagagactattagcattaacaatattagaacgtggtgttcaaatagtaacattaaatgatttagaaagttataaggaatattcgcatatacattaataaataatgaagctgattttataagcaaagttattaatatgtaatatgttcagggttaaaatgagatgaaatttattggtggatttcaaaggtcacgcttcgcctccaccatgaaacccacgaaaatctaaaatttggatttttgtgggtcttttattttatagaaataaattcatcgacatttactgaaagtacagaaaaatatgttagctataaagagattcaaggggatataattcaggtaatgtattataaagatgaaaatgatgatagatacaaatattttaaaaagaaaacggtacttctttatttaatggagatattgaacaaataaggtattatattaaacagaatgtgcagttatactcatataagagtgctatataaaaggttgcttaattgtaataaatcagctgatgaagaaaatcaaaaaaacaagttactagtattattaatgcgtataaagtaattgttcatcataatgtaagtaatgaagaaagatgtgaaaattgtaaattccttaagtatgataaacattacaattacaaatgatatgtgtatttattgaagatcaaatgaaatcagctaataatcaaaacaataaaaaaataagaaaatggattattataaataaaataaaagaatatatgaaataagtagtgaatttaaagcactaggttttgccttgaccatggaaaaaataatattcataataaatcttttaagtattatgttcatattaataaaagggtatataatataaacaagaaaaaagcaaaatacttttattgatttgtggtatatattaaattgataatggggaatgagggtaaaggagcaattatatgtataaaatattaattgtagaagatgatactaccatagcagacatattaaagaattatttgcgcaaatgggggtatgaggcagaaaaaatttctgattttaataatgttatggatgaatttaaaagacataatccacaactactgattttagatattactttgcctttttataatggatttcattggtgcactgaaattagaaaaatatcaaaggttccaataatttttgcctcttcagccagtgataatatgaatttaattatggctattaatatgggagctgatgactttattgccaagccttttgatttaaatgtgatggtagcaaaggtacaagcgttgcttagaagaacttattcatttcagggagaaatgaatattttagaaagcaatggaattgttcttaatttgggaaatatgactcttacatataacaatcacaaagtggaacttagtaaaaatgaatttaagatattagaggttcttttgaaaaataaaaataaaacagtttctagagatgaaataatgaagcagttatgggatagtgatagcttcatagatgataatacattaacagtaaatgttacaaggctaagaaaaaagttggaggatataggtattaaggggtttatcaagacaaaaaaaggcataggatatcttataggtgattgatatgagaaaagaatctacttggaatatagcaatatgttattgcaaagaaaaaatcaatatagccgttaagttttgtgtttttataatgatattttttatggtatattttctatataatataccattagaacctgctttatatgcagctttattagtgattgcattaggttttttgttttgtatatatgattttaaaaattattacaataagcatatttttctaaaagatgtattaaataagattaaatttaaattggacaatcttccgaatactgagaaattattagaaaaagattatcaggagattattaaatctatacatatagataagacaacattactttttaatgccgactataaatatagtgaaatggtggagtattatactatgtggatacatcaaataaaaactccaattgctgctttttctatgtttgtacagtctatggaaagttctcaggaaaaacaacttatgaatcaagaattatttaaaatagagcagtatgtagagatggttatgcattacattaggttagaaaatttgtcttcagatctaagattagaagagtattctattcaagatattgtacgtcagacggtaaagaagtttgcgacaattttcatttataataagattacattaaagttagacgaaattgactgtaaggtaatcactgatgaaaaatggattacttttgttttagagcagattttatctaatgctttgaaatacacaaaaaaaggcagtatttcgatttatatggatgagaatttagaaaaaacattaataattaaagatacaggtataggtatagcagaggaagatattccaagggtttttgaaagaggatttacaggatataatggcagaatggataagaagtcaacaggaataggattatatttatgcaaggagattatcgtaaggctttctcataagatatccattacctcggaagtaggaaagggaactaaagtagctattgatttttctgcaaaagaaatttcaggcgaataaccttacatagatgtaatgtaaaaagaagaaatgtaagctaatgttaaggcaatgcatttctttttttattatacttaatttgtaagtaaagcttacgttaattaatgaatgaggaaattaaataaaataactggtttaaaactaggaaatggaggaattaatatggcattaatagaagtcaaaagtttgaagaagctttatactacgagatttggaggaattaaggttcaagcattagctgatatctcattttctgtagaagcaggtgaatatattgccataatgggagagtcaggttcgggaaagactactctgctaaatatattggctctccttgataagcctacaagtggagaagtttttctggaaggtaaaaatattataagtataaatgaaagagaaatagcagcatttagaagaagtcagcttggttatgtatttcaagaatttaatttacttgataccttttctataaaggacaatatatttttgcctttggtactatcaggaaaagactataaggaaatggagagcaggctggagcctattgcagcgaagataggaattaaggatatattagaagaatatccttatgaggtttcaggagggcaaaagcaaagggcagcaatagcaagagccattataacaaatccaaagttaatccttgcagacgagccaactggctcattggattcaaagtcttctacggagattttagatttattttcaaagataaataaatctggacaaactattattatggtaacccatagtattgctgctgcaagtcacgcaagtcgtgtgctttttataaaggatggaaagatttttaatcaagtttatcgtggagctatgaataatagtgagatgtatcaaaggatttcagatacgttaactcttttaactgcaggaggtgttgaagttgaataatccgttctattttaaattagccaagactaatttaaaggaaaattggagaatttatcgcccatatataacagcgtgcatatgtacaattatgatgttttacattatggattgcataaacttaaacaaagatatatatgagaaattagaggggattagtactacaggactattaaagtttctgataagtgctggcgttaatttaataggcatattttctgtaatatttctattttacaccaatagctttttaataaagagaagaaaaaaagaaatagggatctacaatgtggttggaatggaaaaaaagcatatttctatagttctttctattgaaacattaattatagctactgtaagtttgattgtaggtattttaggcggaattataataggaaaattaatatttttaatattgttaaatttattaagagttgatgttcatctttcatcttcattttcaatatcattaagtgcagtaataaacacaatagaattatttgctttgatttttctagttattttagttgcaaatatagtgcagataaaaagtactagaacaattgatttactaaaaggtaatggaaaggaaccaaaaacctcttggatattaactatttcaggtattattgagttagcttttggttatggtattgctcttaattttaattttagtatagaatctttatcgaagatttattatgtttttgcagctgtgattttggttattttgggaacatatagtacaattataggtggaagcattgttttcttgaaactgttaaagaaaaacaaaaagttattctataaaacaaagaattttgtatcgatatctggaatgatataccggatgaaacaaaatgcagtaggacttgctagtatatgcattcttacaacagctgtaatactaacaatatccacaacagtttctttgtatgttgggcaggaaaaaagcttaagacttgctaatccatttgatgcacatatttctattaaaaatgcaacatcagatgaaaaagataaggtgataaatattttacaagaagaagcaaaagagaataatataagtctaaaaaataatatagaagagagtggtaagggaatgtcagtattaagaagtaataattcatttacttctgctagtaatgttttatttacttctactaataatcctaaagttattggcttatatctcctagatgattataataaaatcgaaaatagaaatatatctcttgaggataatgaagtacttattttctcagtaggcaaagaatataattatgactctataattattaatgataatgagtttaaagtgaaagaaaaaattgataaattaaatacagcgaataaaattgccaatgatcttgaagggtactttgtcattgttaaggataaagacataataaagaatatatataaagatacaaagggaaacagtttagaaaatcttgattattataattcattcaatattgatggtaataaagaagacattagcagattttgtaatacattaaaaaatacttctagtagtacaaaagaatttgattttggaagtattttttttgaaagagaagaggctaatataaaaaatggaggatttatatttataggaagctttctaggaatattacttacattaggaaccgcattaataatttactacaaacaaatttctgaaggttatgatgatagggaaagatttaaagtgatgcaaaaggcagggatgagcaacgaagatataaagggtactattaataaacagatgcttataatgttctttttaccattagtagtatcaataattcatattgcttttgctttgaaatttttaattatagtactaactgtatttggtttatttgacatcaatatatttttcatttgcattactgtaactattgttatttttgcagtattatctgggatattttatagagttacagctaacacttattataaaattgtgcaacaagaaatttagaaatttcctaaaaaagaaatattatattatagcctatgggagtatttgaagaagaaaaaatagttgttaattaaagatggctatgagataaactactataaaaatatagtaagagatttaaagagcactggtgtatttataaaagaggataattaatattgaatagatagtgatttcaaaggctacgcatcgcatccactatgaaacccacgaaaatctaaaatttggattttcgtgagttttttattttatccagaaattcgtttagtgtgataaatggatttgttatataataattagttatatgggatttagcaatgatataatttgaataatattaaagttaaaactaaattgcaaagtttaaattagaaagactataaaaagtctgtcaatagaaagcatttaaagacaggacaagcaaatgaatattatttattataaaacagagaggaataagctttatggattggtttaatgcaatgaatagtgcagtggaatatatagaggaacacattacagaaaagattgacattgaaaaggtggctaaaattgctttatcatctacatttcactttcagaggatgtatcacatgataactggtgttacagtggctgaatacataaggaggagaaggcttacgttagctgcacaggatattatatctggagaaaagataataaacgtagcctataagtacaactatgaaactcctgaagcatttacaaaagcttttgggaaaatgtatggaataagtccattagcggctcgcaagtcaggggtaagtctaaaagcatatcctaaactctcctttcatatttcaataaaaggagataagaacatgaattatagaatttttgataaaggaagttttacagtaataggaaagcaaagaaaaataacgatggctaaccaaaaaaactttaaacaagttcctgaattttggcatgattgtattaaggatggctcatatgattggcttacatcaaaggcagataaacttggtatattaggagtatctaaagattttgataaatatacggatgaatttaattatatgatatcaatagagggaataaaagacggtattccaaaacaatatgttgcagcagttataccagcagcaacctgggcagcattcgaatcagtaggaccaatgcctgaagctgcacatgatctccttagaagaatatattcagagtggatgccatctatgggatatgagcatgattgtgcaccagatattgatgttttaccaataggtgatacatcttctagtgattatagatgtgagatttggatacctattaggaaaaataaataatgtaaataataggtaagcaagttaaagtaataattacattctgtatgattatagctataaaactattatgcggtagttgtatttaaggagggaaaaataatatgttaagttttgaggaaattttgaaaaaagagatagtttatgaaattgatgatatggaaattgttaatatacaaaaaaatataatatatagagctacagataaagaagaactactaatggatttatacactccatttaataatgataaaaaagaaaaattacctgtaataattttggtacatggagaagctgcgtctgtaaattttaaggaaactgggcagtatatttcttatggaaagttattagcatctttgggattaaatgtagtaaattttaatcataaagttttagctgatggctttaatattaaagaagttattagtgacataaatgtacttattaattatttgattgaaaatgctgataagctaaatttggataaagataaaattgctatttggtgcttttcgggcggcgttccatttggattatatgcaggcatgaatgattatgttaataatattaaaggtattgttgcttattatggttttggggattttacatctttaggagagtttcttaagcttaatatatctgaggaagagtcaaaaaagtattcaccaataaatcttatagatgaaaatgcaaatagaattccaccattatttattgcaagagcaggtcttgatagtccaataattaatgaatcaatagatgattttattataaaaggattgaaaaataatttaactattgatatttttaatcaccctacaggtggacatgcatttgatttatttaatgataataatagaacacatgaaataatagaagaatcattagaatttttaagaaagcatttgaaataataaattaaatattattaataagaacataatttgtggtggattttaaaggtcgtgtatagcctccaccatgaaacccacgaaaatctaaaatttggattttcgtaggtcttttattttatagaagattatatttgaggaggatttacagataaatgctatgatttacagaatgcatagatgaatggtggattttactattcatgtgtaaaattatagaaaaaacaagaagtattagatataataaaaagagtagaatggtacaaaagaatttatgggatggagatacatatggaaaaagaattttcagaattactcccttttacggctgatacaaatgggtttgataaagtgctcattcctctaaataggtgtagtccactcgccttcacatgatttgtagttagctgttatccctacgaataaagaatataaaataaattcgctcaaagccaagaatcaataaaatttcattgcattttgtgcattgagagaagcgtgaaaggaatggttataaaaatgaaaaaagtatttatgcagaaaatttctgctgtttttatacttttacttatgttaataggtttatttgggtgtgcagcaacaaataaaactgctgcaaataagcagcaggataaccatgtggaagctacaaaatcagaagataaaaagatagattctagccaagatgaggattcaaagaataaaaaaattattaatgattttcaaggcgttgcagattatatacataaaaatggaactttgcctgaaaattttataacaaaagcgcaggctaataaacttggatggaagccaggagacgatcttagcaaagtagcgcctggtaaaagcatagggggagatatttttaagaatgctgaaaaatctctaccagatgcgcctaatagaatttggcatgaatgcgatattaactataatggaggacatcgtggtgatgataggattctttattcaaatgatggattaatttactctacctcagatcattataaaacattcaaattattatataaaggaaagtagttttttaaggaggtgaatagcttgaataaagtagtaatacaaggcagtaagcttacggatagaaatatgttacaccaaattttaaaacaggaattaaagcttcctgctcattacggtgaaaacttagatgcactatgggattgtctaactactgatattcaattgccagttacaattgaatgggttgactttcaaaaaagtaaagacttattaggtgattatgctgaaaatacattagaaatttttaatgaagctgaaaaatttactggaggaaaacttaatataattattaataattaagaaataatgattttatttaagtaaaataacttgtcgtgatagcgcagcaaatggattctattttgtaaatcaaggaatagttaatgatgatggatataggggaatacatctatattatcaaaatagtaataagcattatctaattgaaatgcaagtaaagactagaagcgatagaatgataaataatgagattgattttataaacaaagttgttaatatgtaatatgtttagggttaaaatgagatgaaatttgctggtggattttaaaggtcatacttcgcctcctccataaaaaccacgaccatttgtatgtggcttgaatagctgcttgcatgtggtcgtggttttttattattatgcatagatccatatataatataaattttaattaagtaatcaggtcttgaaaactactttagaatagcatctattatataaaatcttactttgaatttgaacgaacaaaatttaataattgcattttattgttaacatttaattttttataaatattttgcatatgattatcaacagtttttggtgatatgaaaagtttctcggcaatttctttatatgttaagccttcaatgataagttctataatttcactttgtttttctgtaatatcatatttttgcttaaaggaatctataagtttgttattatccacaaatggtgaagtattaaaatattttaaaacaaatataatactaaaaatatttattgttaaaaaataagcaggaagtgctgatattttcaataagtctatgtttttaataagttcaatatagggtttgtaggattcgattgttataaaaggtaggaatattatagttatcaaaataaaaactttaatagcttgtcttaaatttttatttacaacttgactatagttttttaaaccaatatatagttgatacataattactaaaataattgaagcgcggagcatgaatttaaaaatatagtgtgtatcaaataaataatatatagcaattcctataaattgtagtgcgaaaatagaaaagaatattttcttttttaattttattatttccaagccaaaaaggtagtgtataaagaacaacccaaataaagtgctaaaggatgtaccaataaaatctaaaaagttacataggaaggtcataaatatagttatgtgtgttgtatattttgcgtatagtcctaatgttattgagttttgaatacaaaaaagagaaaggtttaatgctataaaaaactttagaactttctttttattattattatatataaaacatgatattgaaatagaggatatacttgcaaataatgaaataatacaaaacaataaataaatatctttcatgaaaaaatcacccttcatatttttggttataccttggttcctagtatggaataaatccatatatatacagtatttagtataaggtagacgaattaagagttcaatgcttttatatatgaaagtcaataaggtagataataataaataaatatataaaaatgatataaatttatgaaaactagattaataaaggtatagggagtattccctatacctatttttaatgaaattaaggggatttcacctatagattattgttttgtaggatggttaaataatgtgtgtaaggcacgtgcttagaatgtgaaaaaacaaatataagtgaggtatcatatgaatttaagaaagagtattagttttttatcttttattttattgccaattacattggattattttgctccagttttaatagtacaagcaagttgggaagaaacatttgcagctgtacatattatatttggattgatggttttagttggaatattctttggaggagcatggtgtagctatatatgtccatttggtgcattacaagatttagttccgagtactaggccaaaacgtaagttgattaatttaaaatggttaacaggaggaatttttcttacgttaatattagcacctataataatgcatggttttcgagaaataatattaccttatcatatggaagacacaatggtttcagtatccagctttcatgacctagttagatattatataataactctatccattattataatagcagtagttttaggtaaaagaaattggtgtagatatctatgtccaatgtatatatttaattatattggaatgaagattagaagtgttttgaaactaccgtatctgaaaataacctgtaagagcgaaaaatgtattcaatgtcagaagtgtactagaaattgtctaatgggacttgatgtagttgagatggtaaaaggtaatgagtggaatacaaatgagtgcattcaatgtggcgaatgtttaaaggtgtgcaaatgtggtgtattgaaaagagaatggaaaaaataagatgatgctatagtaaaagaagcaacaaataatattttaagtaagcatttaaaggcattcgtggagtattctaaatgaggcatttgagcgaggaacacattcatgggaattggaaagactggtggggtagaggggagtagagataaattaaatattatctattatccaacttctaattgactcaaacttatatctatcttgattgaaaaaaacgttatcagttgatataatgtaggcaatagtccaatggaaggaagtattatatgttcagttatagtcaaatcaaaagtcttaatgatttagaagtttctgtttataattatattatggataataaagataaggtccgatatatgaaaataagggaattagcagttgaatctcatgtatcaactacaaccatattaaatttctgcaaaaaagtagggtgtagtggttattcagaatttaaactaaaatttaaattatttatagaagaaaaagaaattaaaaaagtaagtgaagataatacagagataattgatttttttaagaaaacaaatactgaagaatatgatgaaaagatagaggaaattgtaaaagctatattaaaagcaaagagaactatctttatagggagtagcatgtcaggaattgtagcaagatatggagcacgatatctatcaagtgttggacaatttagtttatgcattgatgatccgtattacccgactacaggtaagttttatgaaaattcagttgtgatagtatgttctgtgtctggagaatcaaaagatattataggtcatataaacagatttaaaaaagatgattgctgtattgttagtattactaacactgaaaattgcactatagcgaaaatgtctgattataatatcccatattatgtgccatatgttaaagtaggaatatatgatattacaactcaaattccaataatcagtataatagaaagaattggaaggaaactacaaaatcgtcgagaagaatctatacaagatgagtaaatagctatgcgcgaaaaataaaagtattattttacatagggctttattgatttgaagtttttaactcaagttgataaagcttattttaattactctttttgtttgttaatcacagttttttttatatatgaaatgtcaagaacacattttgattttaattgcaaaaaaacattttgtttttttgcaataacaaattattaaaaaacagacatgttttttataatggtttacatagtgacagaatccgctttatcaattaacattaagatacattcaatagctattcgaaaataataaatataagtgaggtaataaaatggcaaaggattatgcattaattgcgaaaacgattgcgaaaaatttaggcggtatctcaaatattgaaagtgtaactcattgtatgactcgtttaagagtttgtttaaaggacgactcaaaagtaaatgtagatgagattaaaaaaattaatggagtaatgggatatgtgaaccaaggtggacaacatcaagttattattggaaataatgtatcttatgtttataaggaagttttaaaattaggaaactttggagaacaaagtgacgttgcaaaagggataaaaaaagaaaagctaactatcaaaaaagttggaactaatatattggatgcattagtaagtacaatgtcaccattgataccagcaattatcggtggttcaatggtaaagttagtggtaatgattttatctatgttaaaagtactaccagcagacagtactacatataccttactgaatgctatgggagatgcagcattttatttccttccaattatggtggcagtatcagcatctaagaaatttaaaactaatacttatttaacgtgagttcgaaaagctagaatattttatgggtaaatatggttatgaaaaaaagcaaaaaagtatccttgtaatcttgtggttcgatattccaattattccatagttagatacttgtccaacttaagagaaggtttcttaggaagaaaactatacgaaatcaatcctgaaactatattaaccgcaaaattagtaaaacttctatgtcgattatgctctatctgacatatattttttagttggtcatttattgtttcaatgatagctcttttcctaagaagaattttatcctccattaacattaatttatttttcatgtttttctttatctttgttataagctgaatacctttggaatacaaaatatcggagatctttttagataaataacctttgtcaccaaaaagttttccaaataaatcttttgctaatatttctatagtcttaatttctctatcatctacatttcccggagttagataaaaagagagaatatcccctttatcgttaacaacaagatgaagcttaaaaccataaaaccagcccgttgaacttttaccacgttctgcaattcctttaaaaaccttatgagagtgtattcttctattatggcatacattcaaagttgtagaatcgataaaagaaattcctgtgcacttgccagttctaaatttcatcatgtataatagtagtgcaactaatgattgttgcattaattcaacaaacctattgtagctcacaagcttaggaaaatacggtttgagaacagtagacacatgctcaatataatatgatttaaaagttctgtaatttgacaaatgaaagtagatagttattgtcataacttcgcttaatgataaagttttacttttaatcattgcaaatttgcggtcgctattttccgttaggaaatgacttttacagtaattttcaaatccaatacaaaaattgtctacatcataaaatatttctactaataagttttgcataaaatcccatcctttgttttatttatttggtcgcacttatataataaaacattttgatgggattttttatcccttaaatttttccatcgaactcacgttatttagctgttgcaatagcaggacttatggtacatccagattttatgaaactaatggtaagcgcatcagaaggtaaggaagtaactttagcgtttattcctattgcatccgttaagtatacgtatacggtaataccagcactttgtatgacttggatattatcatatattgaaagatttgtagataagataacaccagaagtaactaaaaatttcttaaaaccagcgattatagtattgattgcagcaccaatagcaattggacttataggacctttaggcatatggattggtacagcaatatcaggtttagtttattttgttcacagcaaattaggatgggtatcagtagcaataatgggagctttatggccactacttgttatgactggcatgcatagagtatttactccaactatattaacaactatagcagaaacaggaatggaaggaatggtaatgccttcagaaataggtgctaatctttcattaggaggagcagctttagctgttgcttttaaaactaaaaataaagagttaagacaaactgcaattgcagctgcttcttctgcaatcattgcaggaatcacagaaccatcactgtatggagtagcattaagatttaaaaggcctttgatagcatcattaatttcaggtggtgtatgtggtgccgtagcagggatagcaggactcgcaagtagatctatggctgcaccaggtttattcacaagtgttcagttttttgatccacaaaatccatcaagccttatttggatagttggaataatgatactggcagtcgtattatctttcgtattaactctaatatttggatttgaagatattccagcagaagataatattgaaataatgggggcagacaatgagtaaatacagtttcccagaggaatttctatgggggggagctattgcagcaaatcaggctgaaggtgcttatagagaagatggaaaaggtttaagtactgtagatgttataccacatggaataaacagaatgaaagtgaaattagggttagaagaagatttgactttgaaagataatgaattttatccaagtcatgaggcaattgatttttatcatcattataaagaagatattgctctgatggctgaaatgggattcaaagtttttagaacttcaatcgcatggacaagaatcttccctaatggagatgatagtaaacctaataaagcaggaattaaattttataaagatttatttttagaatgtaaaaaatataatatggaaccattagtcacattatgtcactttgatgttccaatggaactggttaataaatatgggtcatggaagagcagagaaatgataggattttttgaaaggtatgcaagatgctgctttaaagaatttgatgggttagttaaatactggctaacatttaatgaaataaatatattgatacatagtcctttttcgggagcaggtatatattttaaagaaggtgaaaacaaagagcaggttaagtatcaggcagctcatcatatgttagtagcaagtgctttagtaactaaaatagcccatgaacaaaatccagaaaataaagttggatgtatgcttgcaggaggagacttttatccgtattcatgtgatccaagagatgtatggatggctcatacaaaggatagagaaaatttgtttttcatagacgtacaagctagaggtaagtatccatcatattcaaagagggtatttgcagaaaaagaagttagtattgtaatggaagaaaatgatttggatatattaaaaaatacagtggattttatatcttttagttattatgcttctagatgtgcatctaaggatatggaaaatcaaaccgaagctaatgttgttaaatctataaaaaatcctcatttagaagttagtgaatggggatgggcaattgatccgttaggacttagaataactatgaatacgctatatgataggtacgaaaaacctttatttatagtagaaaatggactaggtgctaaagatacaatagaagaggatggctcaataaatgatgattacagaattgattatcttaggcagcatatcatagaaatgaaagaagctatggaagatggagttgaactattgggatatacgtcctggggatgtatagatttagtttcagcatccactggagagatgagtaaaagatatggatttgtatatgtagataaacaagatgatggaactggaactttagagagaaaaagaaaaaaatctttttattggtataaaaaagtaatagaaacaaacggtgaatgtttaatataaaaaatttaaaggttatgctaagctgtaactataaaacccaagacaatatttattagtattgtcttgggttattttagtttgcagaaatttataaaagaattttacatttataatttatttaataacttttcttcagaaattctttagatttgctccatatttttttgatatatacattttacaattaaactaagaaatacaatttgaatgtacctaaagaagataaaggaatcatttaattaagattatgtattttatatgaataaaactaaaggagtgaattatgaagaagtatatttttttattaatttttgctttatgcataatgtcttttgcgatagaagaagatgtctcggcaaaggaaataataacagaaacaccaaatgtaatagtacttaaaggaacagatgaaactaaggatggatttccagtttatgaacttatggatgacgataaattatttatggatatttacaataaatcttttataaagaaatcagttgaactttatgggcaggctttgcaatattctaatttagatagtaaagatatatattttgcttttagacaaaactctgggtgctatggtaatattggtttttatctaaaaaaggatggagagctttatgataagacaaaatcaccctatattgaactttctactgcacaattgaaaaattataatgcccttgagtcaataacacaaattttacctcatgaaatgggacatgttatacagaaaattactacatctaataatggggagataaatcaaaatgtagtagacatgcattattctaatatacaaacagaatatagcactgctttttgtgaagggtttggagaacattttgaagttatttcaagaatgtatgaagaaaataatgaaattaaaaatggaatttataaagagatagaaggaataaaaaatagtactaagtctatagtaaatagtgcatctagagattttacattgcctttaagattggattattatagagaggtatctcaattttggcaacaaaagtatgaaaatttaaagaggcatgaacttggtttaaatggggatggtaaatacaaaaatttaagttatgattttatggatcctgagaaatcaattttatatagaaatatgggactttatcaagataagacaaagatgaaaagcttggagcagagtttatctactgaaatagttgtttctaatttctttattaaacttataacaactgatacctcagaattaaatgaaagatattctaaggtctttaatgttttcaataagtatttaaataaggatagtaaacctcaattgatagaatttgttaatgggtatataaaggaatatccggaggaaaaggataggatattacagatatttaaagacagcacaggtcatgattttactgaagaatgtgctccagaaatatggtgcattagtgaaggagaacatagtaactctatctttgatcaatttagaggtcttaagtttccatattatatatttaatataaatacctgcgaaaaagaagacttacttagactaaagggtataagtaaaagtgatgcagaagggataattgcatatagagataaaaataatggatttaagagtactgaggaatttgctaatattgaaggggtaagcggtaaagccatagaaatactaacaaataatactaacaaagagcagattgaaaaagtaacaagtactatgaatgaaagaaaatttgaaaagagtttttatactatatttatagctaacattaaacatttaatattaagaactatggtgtgatttgtgatttttttcttaacttattatttatttgttatgaaagccacatttaaaaataaaaagagcatttttaaagttgctattaagaaatttttaaaactaatgttttatgtattaatagggtttatggctgtagcagttagtagtattattgtaataggaaatagagctttaaatcctataataatttttattacagtgatttttatatgtgaaagtataacacttttaataataaggaaggacaaacttaaggtaagagatagtattatatcaaccttaatgataattccaataattatatattcacaatattagatatagtcaaaaagatagcaagtcaatatttataatttcagctataaatttgatttgctattttaatttaggagaataaataacaagttcaaatacgctataagataggcttgttatttgattgtgccttagggactaaaggaggaattctaagtgctaaaacccactatattggtagttgatgacgaaaaggaaatcagagaacttatagaaatctatttaaaaaatgaaggatataatgtaattacagcagaagacggattgagagcattagatatatcaaagaaagatacaattcaccttattgttcttgatgtcatgttgccaaatattgatggaatacaagtttgcaaaaatataagggaatatttagatgttcctattataatgctgtcagcaaagagagaagataatgataaaattttaggtataattactggtgctgatgattatatagccaagccatttaatcctttggaacttgtagtaagagtgaaagctcaactaagaagataccttaagactactacaatgcctaaaaatgatgaaatagtaattgatgatttggtaattaattcagatacgcatcgagttacaataggagataatgaaataaagtttacaggtaaggaatttgagatactaaaattgttagcagaaaataaaaatgttgtgtttagtagtagaaagatatatgaaagtgtatggaatgaagagttttatgaatcggattctacgattatgacccatataaaaaatataagagaaaagcttggggataatgtaaaaaatcctaagtatataaaaactgtatggggagttggatataaaattgaagggtaaaaattttgggggaattaggtttacatttcttgttatctttttagtgtccttaattttaagtatagtaattactcttgttataaatgatagttggaggagtaaacaaacaaattattcaaatcaaataaggaattttactcataattgtaaggaaatatataaagaaatagatgaaagcataagtaatgatgaaaaactccaagaaattgtaagtagagatacaattaaatacaaagtatttatagttgataaacaaggaaaagtgctatttagccctgaaaatggtggtataaagcagtttgatataaataaaatcttaagtgagcaatacaaatctaattttgataaaaataacataatgtactacgatataaaatccttaggggaagatagatatattgtagtttcagatgttttatacaaaggagatatttcagcttcaaccctttttcctttagcaatattaatatttgtagctttattctcattattaagttatggaaaggtaaagtatataaatagtctgtcaaaaggacttgtagaaatatcaaaaggaaatttaaattatagagttaaagtgagggggagagatgagctggctgttctcggaaaaaatataaattatatggctgaagaactaatgaatttaaaagagaaagaaaagaagattgaaaaaaataaagatagacttatagtaagtgtatcccatgatttaagaactcctttaacatcaattattggttacataaaactaataaaagagaagcataaagaaaaagatgatataaacaaatatatagatataatcgataataaatccaataggttagaagagttaataaatgatctttttgaatacacaaaacttacatcttgcaatattaaacttgaaaagatggatatttcattaaatgagcttatgagacaagttgtagagggaatgatggctgtatgtaaccaaaatgatttaaatattttatttgaagcaccaaatgaagatttaaatgtaaatgtagatccagcaaaaatggtaagagtatttgaaaatataatttctaatgctataaggtacagtaataagaaaagtgacataaatataaggattcttaaaactgaaaatagagcaatggtaagcattgaaaatgaaggtaagcctataaaagaagatgaacttaataaaatttttgatatgttttatagaactgatgaatcaagaaataatcgaactggaggctcaggtattggactttcaattgctaaaagcattgtggagctacatggaggcaagatatgggcagagtgtgaaggaaataaaatatgtatttatgtattaatataattatataaagtggtggaattaaaaggttatgattagcctctaaaatgaatcccacgaaaatctaaattttagattttcgtgggttatttatttttgcctatattgcaaaggcgtacatttcttagattttttgaattgttttataaagtaactaaagttatcaaatccgacattcatgcttatatcaagaatactagaattagtattttttataagagaacaggcacgttcaattctgtaattattaatatactcaatgggagtttttccaatgaaagatttaaaaaatctagctaaatactgactattcatatttgcaattcttgataaatcatcaatataaattttgttttgataattttcgtgaatataatttaaaagtttctttataatatctattttatattgtttttttatattcatataattcacttcatttactaatttatcttcctctacaaatagtgaaattattttaagtaatgaagcttttatatttaactgccaaccagcttttcttttttgataagaagatattattagtaaaatctcatcttttattctcgatgaattctcaaaatttaaaagtataggaaattttaaatttccatttagtaaaggtctaatgtaatgatcttgacaaacatcataaatttcataacttaaaatgcttaaagaaaagactaatgcataatgagctgaattatgactttttattgatgatatgctatgtaatgactgaggatttataaaaataaaagatccttcatcgcctataaccgtatcattatcaatagttagttctaggtcacctttttcaacataaactatttctatttcatcatgccaatgatgtgaaacataatatttatccttggcaatatgatgataaatgtgaaagtggaatgaggattcaccatgtacagatttttcttttaagtgtatatttttcatatatattatctcctaaaaagtcagaataatgttatttttttatgatttagtacaagaataaaaattaaattgaaattataatacaattataaagaagggagtgaataaatacaaatcaaaattaaatggaggataatttatgacgagaaaatggtggcatgatgttgttgtttatcaaatatatccaaggagttttatggatagcaatggagatggggttggagatttaaaaggaatcatatctaaattagactatttaaaagatttaggtattggagcgatatggttaagtcctataaataaatctcctaatgttgataatggttatgatattagtgattattatgacataatggatgattttgggaccataagtgatatgagaacattagtagatgaaatgcattcaagaaatatcaaattaattatggatttagttcttaatcatacatcagatgaacattattggtttaaagaggcaaaaaaggggagaaataataagtatagagattattacatatggagggataaacccaatgaaatcgaatccaattttggtgggtcagcctgggaatatgataaatattcaaatcaatattattttcacttacatgataaaaggcaaccagacttaaattgggagaatccattacttagaaaagatatagagaaaatgattaatttttggttagattttggtgtagacggatttagatttgatgtaatcgatcttatagggaaagaagtagataatctaattaccaaaaatggtcctaagttacatgaatatctacaggaattaaatagaaatacatttggaaaaagagatgtattaacagttggcgaaacatggggagcaactcctgagattgcaatgttatattctaatcctaataggaacgaacttaatatggtatttcaatttgaagttatttctttggataaaaaagaaggcggacacaagtgggatttggcacccttagattttatgaaatttaaaaaatcatttagtaaatggcaaacatgcttatacggaaaaggatggaatagtatttttggtaataatcatgatctgccaagaatggtttcaagatggggaaatgataaggaatacagagtagaaagtgcaaagatgcttgcaactatgcttcatatgcaaatgggtacaccttatatttaccaaggcgaagaaattggaatgacaaatgtgaaatttgactctatagatgattataatgacatagaatgtttaacaatgtataaggaaagaatgcagcaaggatataatatagaagaaattatgaattcaatttacgtcaagggaagagacaatgcaagaacaccaatgcaatggagtagtggaaaaaatgcttcatttacagaaggaattccttggttgaaaataaatgagaattataaagagataaatgttgaacaggcattaaatgataaggattccatttattattattataaagatttaattaatcttagaaaaaaatatgatgctattaaatatggagagttcaagcttattttagaagaaaataaagaagtttttgcttatactcgtacctataaaaatgagcagttacttgttatatgcaatttttatgaagatacaaccgaaataatagtgccaagggaatttttaggcaaggattatagtattttaatatcaaactacaaagaaaaaactagtttagaagaaaaaattaagttaagaccctatgaatcaattgtttataagttatgacagataaattataatgcgcaataaaatatgttagtatgcctagataaaattttaattaaaattaaatgttgcgaattagaatataatcatttgctagatttaaaatatttcgtctaaaattaaagaaaacgttataaatgagtaatatacgtaatttaaataaaatcaattatgattaaatttatttaatttgtaagaatcaataaagggggacaaatgatatggcaaaaacatgggaaataaaagaaaatgctaaacaaattttggagataataggtggtgctagtaatataatcagtgctgcacattgtgcaacacgtttacgattagtattaaaggatgaatctatagtagatttaaaaaaattagaaagtatatctttatacaaaggtcagttttctaatgctggacaatttcaaataatattaggaagtggaattgttgatgaggtatataaggagtttattaaactagcagatatatcagaatctaccaaggcagaagtcaagaaacaggcagacactaaattaaatccacttcaaaaacttgttaaaactttagcagatgtgtttgtaccaatacttccagcattaattgcaagtggattacttatgggattaaataatgttttgacatctcaaggtttgtttatagatggaaaatctttaatagaagcatatccaggaatagcagatttagcaggaatgataaatacattcgcaaatgctgcctatgtatttcttccagtgttaatcggcttttcagcaactaagctatttggtggaaatccttatttaggggctgtaataggtatgataatggttcatcctgatttattaaatggatatggatatggtgaagcagtaacaaatggtactattccaacatggaacatacttggatttagtatagaaaaggttggatatcaaggaacagttcttccagtgttagcttcttcatttgtattagctaaatgtgaacattattttagaaaaattattcctgaagtactagataatttattaacaccacttttatcagtttttgtaacaggagtattaacatttacagtagttgggacattaatgcgttcattaggtaatttgttaacagatggcatattatggcttcataatagtttgggaattataggtggagcaatatttggattaatttatgcaccatttactttgacaggtatgcatcatagtttacttccaatagatatgcaacttttagcaaatgcatcagtaacaggaggatcctttttatttgctatagcagcatgtaataatgtatctcaaggtgcttcagcgttagcagcaatgatgttatcaaaagataataaattaaaaggaatagccctaacttcaggaatatcagcattacttggaattacagaaccagcaatgtttggagttaacttaaagctaaagtttccattctatgcggctatgataggttcagcagtaggttctgcatatgttacgcttacaaatgttctaaatatttcaccaggagcagcaggtcttattggctttatatgcattagaccacaatcaatattaaatttctttataggaataggcttagcatttgtaattgcatttatttttacaattgtattatctaaatcaaaaaaattgaataaagtagtttaagcaaaaaataatacctttcttaaataaagtaagtcagagaacttataaagaaaggtatttatttttaagaaaaatcgctttttatttaataacaaagtaatacaaatgggttcgtgcatttaattttagttaagcaaaggtggagaaagatggattataagaagatatatcagaatatagaagaatactattcttatgaagataaaaaaatttggagaaacaaatttcatatagagatgccatttgggttagtaaatgatcctaatggattaagttattataatggggaatattatatattttatcaatggaacccatttggttgtgagcacaaaactaaacattggggattagttaagacaaaagattttataaattttactaaaccagaaataatattaaaacctgaagaatggtttgataaaaatgggtgttattctggtggtgcatatgtaaaggaggatacattaaaactattttatactggtaatgttaaggattctaataatgaaagaaaatcatatcagtgcatggttgattataaagatggttcatttgagaaaaagggagtattgattgataaacaaccagaaggttacacagctcattttagagatccaatgatatttgtagaaaatgaaatttattatatgatagttggagttcaaactgaagacttgaagggaagagcattaatatataaatcagatgatataaataaatggagttttgctggtgagttaaaaacagatgtggacaaccttggatatatgtgggaatgtcctaatataattaaagtaaatgaagataaatttgcatttatgttttcgccacaaggattaaaggaagaggaatttaaatatcaaaatatatatcaatcaggatatttaatcggagaattaaatttcgatgaagtttcactaaataaccatactgagtttaaagaaattgatatgggatttgatttctatgcaccacaagtatttaatcatgatggtaaaaatattatgataggttggataggaatgcctgataaagatgatgaatatttaacttcagaatacgggtggatgtttggactaactatgccaagagttttagaatataaagataatgttttatatcaaaggccacttgaacttttggaagaattaagagaatcaaagattatggatttaaaaaaccaatatgtagatgattatagtattaatattaattcacgaactatagaatgtaacttagatttagatatgaataattctaataatatagagtttaaatttaaatttaaagatgaatatatttcaatattatataacaaagaagatgaaatatgtacattggatagaaacaatatggagtttggtggaaagggaatacgaaagtttaaattaaaagctaataaatcattaaagctacatatgtttatagataattcatttatggaaatatattatcaagatggattagaaacaactactttagtgtattttcctaagagtgatagttttgaaattgaaatcaagaatagtgtaaaaataaacgaattacaaatttggcacttaaggagaattaattatggaaaataaagtgttttgcataggtgaattaccaattgacatggtctgaattgataacaaaggactaaaagatggagaaaagatagaagaaatatttctgaatctaagctatcagactcagaaataataacaattagcattgaaggccaaccacttataactgattctgaaaaagcttaggtccattttgttaaatctaaattttacatttccgcggtttattttagtttatagacatttagagaaagacatcactataaaaaacacattaaaaagtagcaatagaaaagtattttggaattagcaaaggtgaattatatctaaatgacgcaggattttattaaaaatattgatagtatttttccttttgcttcttaaaaataacaatcaaatccgtttttaacgaatatatttttatactccaataaatcttcttcatgaagttgttgcgtattttggaaagcatatggtttgttcagaagttcgtattttttctgcccaaattgatgaaatggaagtaagtttactttcttagcattaacggactcaagtaatttacaaaattctttagcatcttctaaactagagtttatgtttggaatgacaggaatacgaataatgacatctttaccgttatctatagcaattttcaaatttttaataattaaatcattataaacatttgttactttaaaatgcttttctctatcatagtgttttatatcaaataataataaatctacattatctataaaacttgagaatatttcatttgaagtatagcccgtagtttcaattgctgtgtgtatatttttttcttttaaaacctttaaaagctgtgatgcaaattcatgatgcattaatacttcgccgccagataaagtaacgccaccatttgattcttcataaaacatttcatctttcataacttcattcataacatgagaaagggttaaaaattcaccttctgctgaaagagctttatgaggacaggaatttttacaagcaaaacaagaaatacagttgttagaatcaatttttatatgattatcatttaaggaaatagcattattttgacaaacgtctatacaatgaagacattgtgtgcacttagttttatcacatatgatttgtatcttactatcttgagattctggatttgaacaccataggcaacttaatggacagcccttgaaaaaaactacagttctgattccaggaccatcgtgtatgctgtatttttgaatattgaaaatgcaagcttttatatcgttcataaaaacacccccatataataaaagcaagattagtattaggattgaacctcgataatttaagcttcaattgatgattcaatgttaacatgaaaaaatataagtgtaaataaaaagtttcatttgaaataattgagtatttcataagaataataatttgatgtttaatattatttgaagtagtatataatcaataataagcagagttgcttttattcgaaatataaataattcattttgtaagtaatttatgatataattaccattggatttaggtatatagaatagctattttttgaatctacctaagagaaggaggagtttctatgacaagtaggtatacaaagcttcttgaaattgtcaatgaaaacaagcgtatagaagtcagtaaattatcagagcttttaaatgtatctcaagtcactatacgtaaagatcttggtgcattagaagaaaaaggattattgaagcgtgaacatgggtatgctgttatgacttcaagtgatgatatcaatagcagattagcttttaattacgatataaaaagaaaaatagcacaattagcaagtaaacttgttaatgatggtgaaacagttatgattgaatcgggctcatcttgtgccttacttgcagaagaacttgcatataataaaaaggatataacagtaataactaattctacatttattgcaaactatattagagaaggaaatgcgaaagtagtgttgcttggaggagattaccagccggaatctcaggtatcagtaggtcctctaacaagaaagtgcgttaatgatttttttgtagataaattgtttatcggaactgatggttataattccaaaatagggtttacaggaaaaaacttaatgcgtacagaaacggtaaaagccatggctgaaagttctaataaaattataatattaacagaatcatcaaagttttctgagcgtggagtggtagctcaatttaaagcagaagagataagctatttatttacagatactaatattcctgaagatgttttagaaagtttaaagaaagaaaaagtggatgttcaaatggtaagtgtaaattaatatgatttataagaatagaacaatcataatataggaatttataagatgcataggtatagtgtttactttagtgagtaaacattataatctatgtatttttttattatctcaaataaaaaggattttgttattcgtttcgaagataattatataagtttcaaatgaaataatggtattgacaaaggatattgttgatatataatctaattatgaaagaaaataaaagtagtttcaaatgaaagtaaaaaaggtttgttataatatgaaattgataatgaggggagaatatttatgaatcattttggagaattaactgatagaatgcataattttagagaagaattattaaatgcaaaatctatggttagtgtagaaagagctagacttactacggaaagttacaaagaacacgctgataagccaatggtattacgtagagcactatgtttagaaaatatattgaaaaatatgactatatttattgaagataactcgataatcgcgggaaatcaagcagaatcaaatcgctcagctcctattttccccgaatatgcaatggattgggttatagatgaacttgatgaatttgaaaaacgtgcaggtgatatattttatattactgaagaaagtaagaatgttttaagagaaatagcacctttttgggagcataagactttaaaagatagaggtcttgcagggatgcctgctgaaagtagaattttttatgatttagggattataaaagcagaggggaatattacttctggggatgctcatatagcggtaaattatgaaactgtattaacccttgggttaattaattataaagagcgaacagaaaagaaattaaaggaactagaccttacagactataggaatctaaataagtcttatttttatagagcaattttaattgtacttgatgcagtagcagcttttgcaaagcgttatgcagatttagcattagaattagctgaaaaagaatctgatgtaaatagaaaagaagaattacttgaaatgtcaagaatattaaataaagttccatattatccagcagaaactttcaaggaagcggttcaatccttatggataattcacttagttttgcaaattgagtcaaatggacattcactttcatatggaagaatggatcaatatttaaatcctttctatgaaaaagatttaaaacttggaaagattactgaagatagtgctactgaattattaacaaacttgtggcttaagacttttactataaataagataagaagctggtcacatacacgttttagtgcaggtagtcccttatatcaaaatgttacagttggtggccagactgtagataaaaaagatgcagtaaatccattaagctacttaattctaaagagtgttgctcagacaaaattaccacaacctaacttaacagtacgttatcatagagggttatctgatgattttatgaaggaatgcatacaagtagtaagattaggattcggaatgccagcctttaatagtgatgaagttattattccatcattcatagaaaaaggtgtagatgaaaaagatgcctataactatagtgcaattggatgtgttgaagtagcggttccaggtaaatggggttatagatgtactggaatgagctttttaaatttccctaaatcattattaatagctttaaatgatggagttgatcccgagtcaggaactaagctttgtgatggtgtaggtcactttaaagatatgacaacctttgatgaagttatgaaagcttgggataagataattcgtgaatttacaagacatagtgtaataatagatagctgtgcagacttagcaatagaagaagttacagcagatgtattatgctcagctttaacggatgattgcatcgagagaggattaaacttaaaagaaggtggagctgtatatgattttatcagtgatcttcaagtaggcattgctaaccttggtgattctcttgcggcgattaaaaaatgtgtatttgaagataagagttttgccccaactgaattatgggatgcactgcttgacaattttgaaggagaagatggtaaaaggattcaagatatattacttaatgacgctcctaagtatggaaatgacgatgattatatagatttattattaagagaagcttatgaaatctatattgatgagataaaaaaatataagaatactagatatggcagaggtccaattggaggatgctattatgctggaacttcttcaatttcagctaatgtgccacaaggagcaggaactttagcaactccagatggaagaaaagctggagagcctttagcagaggggtgttcaccatctcatgcaatggataaaaatggtcctacagcagtatttaaatcagtttcaaaattaccaacacacgatattactggtggagtattattaaatcaaaaggtaacgccacaaatgttatctaaggaaagtgatagagaaaagttaattttattaattagaactttctttaatcgtttagaaggttttcatgtacaatacaatgtagtatcaagagatactttacttgatgcgcaaaaacatccagaagatcatagagacctaattgttagagtagcaggatatagtgctttctttaatgtattatcgaaacaaactcaagatgatataattgaaagaacagaacaagttttatagtaaaataattcccaaagtgaaatgttcgttgatattatttatgaacctcacgaccatttgcatgtggcttaaatagctggttgcaggtggtcgtatttttgatactggcggcttaatcttatatattttgtaaaagattgaacaatctataaattaatcaatatcagaattaattttatttttttcttcagaaatagtatgtaggattctttttagaataatcactgtttgttcttcttctttcttagataagtttttagaaaaaatagcaactaattctaaaaaggttgcatctattttaggtataactttttttcctgcctctgttagatataacctataaatacgcttatcattttcatcctgaatcctttttacgtaatcatttgatactagattttttactgcttttgcagtagttgatttacctacatacagaaactcacttaactctttctgacttataccttcattttttgaaatcacatataaaaaatcatgttggccacttctaatattcaaatctataagctttgaatttattatgctctgagcatttctataaattgctgcattaagtttactaatgttctccatagttacttatctcctttacattagtttcctataaagtgaaacttttcaggtggagttttaactccagctgaatttagttgaacttataacctcaagggtcacaatgtaccctcaaggggcactttgtccagaagcgtgcagccgttatctcccgcttaaagaaaagggagtgttacggatgctagctatcggataaaaccatcttaaattatatatataaataattatagtttcaatgatttactaggatatatattttttgaaattatgaattggtattttaaaatatagattgtattatttgcaaaaagaaaactctgccagtgataaaacgcagagctaactttgtatgtgattaatatacgttttgagaatttatattacgtactaatcctaaggtaaaatactacttttttacttgtaattgaggttttctctttctgccaataatgaaataaagaataaatgctataatagcagccccacttgcccacagatacatttgagcatatccaacgtttgatgaaactactcctaaaattactgcacctaatcctataccacaatcaaatgcagtgaagaacgtagcattggcagcacctagacgtgaaggtggaaccccagccatggccattgtctgtaaaccagattgagttgcaccaaagcctattccgtaaataaatgcggcgattaaaaacatgctaatatttgaagcctcagataacagtgccatagatataattacacatataaaacctggaataattgcatagtcaaaacctaatttatctattattttaccgaatattggtctagatataaataaggatattgcatagactgtaaagaaaattccaatgttctctatgcctttctgtgaagcataaagaggtaagaaactggttaatgcaccataagttattgttacaaaaaatactataatagaaggatttatagatattttttcatacaatgaatcttttattttagtttgctctttattttcaatttttttatattctaatttaaaagcaataatacccccaagcacggctagtatagtagatgttaaaaatagagcttgaaagctatattttgatatcacaaatagtccaattgtaggagctactgccatagctaaactacttgtcagactaaaatatcccattccttctccaaaacgatcatttgggatattatccgaagcaattgtattagaagctgtacttactgccccccagccaaagccatggataaaccgtatcataataattgcactaataaatggaactattgaataagaaaatactgatataataaatataaataatccaactaaaaacaccttttgtcggcctaacttatcaagaagtaatccagagattggcctaattattactgaagatactacaaatgctccagttactaatccaatgatagagtttgtccctccaagtttttttgcatagagcggaagtgtaggtaatagcatttgaaatccaaaaaatattaataagtttattatgtttataataacgaagttttttgtccaaagaaccttatctttttgcatatctttttccatgaacgatctctcctttacaatattagtttcctttgcaactaatattacaataacataaattagtttcttgtgcaactaatttaattgacgaattcaataaaatttttactcataactaatgagatttaagttgatatttaaatagtaccaaaaagtgggtataaggaatttaagttgtaattaataggaatttatatgcaaataatgttaaaatataataataaagagtataatagttttattaataatttaattactctttaacataactagtggggaattcaccaacatttatataaaaattttaaattatttagatataaatatctcttaacataaaattatggtgtaaagtaacaagaaaatattaagtgaaattaaaaagtttacttaataaagaagggagctaaatgatgaattgggaggcgtttgaaaaggctttaattaattacgataagttagaagttaataaaattcttcaacattttttagctgaaaaaaatgggattgattttatcgatgattatatagttaagtcattgacttccattggggaaaagtgggaaagaggagaggtagctttatcacagatatatatgagcagcaggctttgtgaggaaattgctatttctattttggatgaaaaaaatttcacaattaagaatgcaaagccgattgcaatagtgactcttgaggactatcacactcttggaaagaaaatcgtaagtgctgttgtgaggtcaagtggttttgaccttatagactacggttctataagtggaccagaggagataataaagagagtcactgaagataggataaaaatacttatgatatcagtattaatgtatccatctgctttaaaaattaagaaaatatctcaaatgcttcataaaaaggatccttcaattaaaatattggttgggggggcaccttttttaatggatagcactctttgggaagaagttggcgcagataaaatggggaaaagcgcagccgataatattgttattatagaacaatggatgaaggaggattcttaatggaaaaaaggtatacttctatggaaagagtgttgacaactatgagtaagcatgaaccagacaaggttccattgtttttaatgtgtacacattactgcgcaaaatttttagatgtatcaattaaaaactattttagtaaacctgagaatgtagcaagaggacaaatgatacttcttaaaaaatttaataatgattgtttaaatccattttattctgctgctcatgagtatgcagcttttggaagtgaagttattttcaatgaagcaggttctccaaatgctggtgaaccaataataaaaaactttgacgatattttaaaattacaaccaccagatgttaaaaattcaaaaattcttagaaactgtcttgagacaatatcaatactgaaggaggaagtggggatgtcggtccctattgctgggggcgtgttatctcctttttcacttcctattcttcaaatgggttttgataagtatattgaacttatttatgaaaaaccagagttgttggagcatcttataaaaatcaatgaaaggttttgcactgaatgggcaaatatgcaattgagggcaggtgcaacatttatatcatatatagattctatgtctgtatcttcaattattcctaaaagtatatatttaaagaccggattcctttctgcaaagagaacaataccaactattaaaagtgatgtggccatggctacgtcatcggcaagctctgcctcaatacttgaggaaatcattgaagctggaattaaagctattttagtaagccatactgacgatctagctgaaataaagaagaaagtcggcaaaagagctacattgcttggaaatctaaatggtattgaaatgtgcaggtggaccagatctgatgctgaatataatgttaaggaagcgataaaaaaagctggagttggtggtggtttcatcttgtgcgacagtttaggagacattccttatcaggttagtgaggatattctttatgaaatatcagagagtgtaaataagtggggaagatatccattaaattggaggtgattatatgaacgataaactatgtattttaatttgtgaaagtttcaaagctgaagtagagagtatgctagggggattgaaaaatggagagattgaatttaaatactattcaatggattgtataaattgcaatcgtcaaagacagaaattatatgatggccttattgcatcaggttattgcagcgactcagttattttgctgccaactcagaagggatctggaaaagatgagaatcttgctggtgaaagtattttcaattcatgtttttcattattggctggaggtgatctaataaattacctttcttcaatggggtattatttgactacaccaggttggctaaaaagatggaagcgtattattatggatatatatggatttaatcaagaaactgcacgcgaatttttttcagaatactgtaaaaaggtggttcttattgacagtggcgtatatagcaatatcctacctgatttaatagagttttcagaatatataggaatgaaatatgaaattatagatgtaggtttggattgcttttcaagcactataaataattcatataaaaattggaaaattaatagactagagtacattttaaatttaaaaaacaagcaggtcactgattatgctcttgtatttgattttcttgaaaaaaaagcaacacttttaaaacgtgaagacctgattaagaatatttttactttatttgaaatgttgaccggtgctaagcatctcgcatttcttcctgtaattgaacataaaaagggagaaataattttccatcaggagaagttgtataaaagtgaactatatgatatcgacaactcagaatttaggcaaagttattttcttacttcctcaggagcaggatttatttttaagataacttttaataatgaattaatgggttatatggaagtggaagatattatgtttcctaattatatggaaagttatttagatttatcaaaaacaatcatgataattctaggaataatgctttttaattcaaagatttatgagaaattaattgatacaaatgaagaacttctttcattgaataatgagcttgaggttcttgttgataaacgtacttctcaattgttggaggttaatggaaaccttgaagaaacaaactgtatgttagaggaagaaatcgaagagcataagttaactgagactaagcttaaggctgcaaaagaggaagcagaaagagcaaactcggctaaaagtcagtttctggcaaatatgagtcatgaaataaggacacctatgaatgggattatgggaatgactagcttattggaattttcaaagttgacagatgagcaaattgacatagtaaaaatgattgaaacttcttcaaaacatcttcttcagattattaatgatatacttgatctctcagtaatggatgtaggcaagattgaactaaagccagaacgtgtaaatatatttaatttaatgaatgaaagtagaaatttatttacatatttagcggagaataaaggactgaagcttgagattattgttgacaataatttaccgaatgaaatcatattagataagggcagattaatgcaagttttaagcaatttaataggaaatgcaattaagtttactggaaaaggtaaaattcaagtatccgtagataaagttgaggataaagagaataaagtgaagctaatgttttctgtaaaagatacagggattggaattaaggaagaagacattccgagattatttaattattttacacagttagatatatcggcttcaaaaaaatttcaagggactggtctggggcttgctatttctaaaaatatcgttgagcttatggggggagaaatatctgttgaaagtcagtatggtaaaggaagtacattctactttacttgtttgtttgatattgctagtgatagtaaggaatcatcaaatattcaaaaaatgtgtatagataacaagtcttaccctgaaactaggatattacaagttgaagatgatattatcagccagcgatttatgaatcaattatgtaagattgcagggtggaaaataaaaatagcttcaaatggattagaagcattaaatatacttgaaaatgaggattttgatataattcttatggatattcagatgccagatatgagcggaattgaacttacaaaaataattcgggaaaaagaaaagttaactggtaaacatattactataatcgcaatgacagcatatgcaatgggaggagatagagatatatgtattaatacaggcatggatgactatattagtaaaccaattgaagttatgaaacttaaagaagttattactaagtatagcaataactataaatagagtatttatagaatattaaaaaatctaaaagattctacataaactgtataataggatgcgaagaaaagtaagagtggtctagagtatttcactaattaattaggcgattttatgtgtctttaagatagtgaatcataaaggtagttcttcgcctccaacatgaaacccacgaaaatctggaatttagattttcgtgggtcatttcagtttatagtggttttaagaataattatacttaatatgatgaataatcaaattttatttaatttttagttatagcctataggtattttgatataaattacagttccaagtcctaatttgctatttataaggagaccataattatctccataggttaacttaagtcgtttatttgtattaaacaggccaatatgatttgagtattcaccgtcaaaattaagcttgtctcttatgttcttaaggttttgtgtatcaattccaatgccattgtcaataattgcgagtgttaatagatcatttttgagtaatattttaattttaatcttaccttttccatctttatttttaatgccgtgatatatagaattctcaaccaatggctggatcaataatttaattgtgtggatagcttctacattattattatagatccataatacatcaaatttatctgcatatcttatcatttgaatatctagataagtttttgtgtatctaatttcgtcgccaagagaaactttgccgcaaggagttgttaaggagtagtctaatatactagatagattttctatcatcctaataggtttactattactcccggttgcctttattacttcccaatatattgtgtgtaatgtgttatataaaaaatgaggattaatttgagattgcaatgcaataagttccatattttctaatttatattttctttcagataactgtacttttaaatagtcttgttcaataaatgtagtaatcagattttctataatataactaaattcattttttgtattactactaattacaggaatagtttgattttttttagctgaatcaattattgatataatattcgaaatctgtttataattttttctagtaagatagaaggttaaaattaatcctaaaataaatgaaactaatagcagtataatagtatatttgcctaatcttatagaaacataatataaagcatcctctggaattatagatatataattccatgaaaatctattagaatgaataattgttttacttaaaaatttattttctgatgtagagtaaatcacgttagtattcgattttaatagttcattaatattaaaattatttatattattagaagttttgttactgataatttcactattgttttcatctaatataaatatcttttgttcaggtgcagtaacagatttatttagcaaatcttgtatgtaatcagctttaatatttaaaactatcacaccattattaagagccattcttttataaactgttataagttttgtctctttttcttcaaagtcatattgctttacatcccttgtttctatccataatttttcatttgctggatgatttaaatagttcttgtaccaagaggtatcaaagtaattatttagatttgttataccattattagttgtataaaatcgtccattttcattttcatagtaaatgtgtatggaataaatgtaaggttttgaattagcaaatgaattcagaaaaaagcaaattttatctgtatttattaaatctggtgaatatattgtttcttcttttaaaacattttttaaagtaagagcaatactagaattataatcaaattgaatattaagagtatcgatttcattaaaaatcaggtcaatattagattttgtttgatttagaagatcagtattattttgagctatttgtttttttatatatccttgagtaatagctattgataaagcgcctaatagtagtgttggtattagtaaaggaattaaaaatataatcaaattttttctgaagaaattcttattcaaaaaattcatcacctttcaaaaggcttaggattaatagcatctttttgatttctatattccttaggactcttgccataatagtttttaaaagttctggtaaaattttttgtattactatagccaaccatttcactaatttcataagttttatatcttatatcatttaatagctcagcagcgcgattcattttcacccttattaagtaattagaaaaacattctccagttttttgtttaaaaaattgacttagatagttaggattcatgtgaactgattcagcaatgtcttcaagccttgcatctttatagtgttcactcacataatttttgacaaatgaaataatttttgagttataacttgatgagtctttaaaattatttatatcctcatccaaaactttatctacattaggtgaacattcgctgtccaagcttttttttaaagaagaaaaaacttcaaaaatttcattgtattttgaaggctttacaatataatcactaactccataaactagagcgctatgtgcatattcaaagtccttatatgcacttagaaagataacttttatttttagcttacgattaaatatctcttttgcaagcccaatgccatctaaaaacggcatttttatatcgcaaaggattacatttacaggattatttaaaatgtactctaaggcaagttttccattctctaattgatcaacaatttcaaagcctaaatcattccatggaaaatagctgcataataagtttcttgattcactttcatcatcgactacaagtagtttgtacattattatgttccccctatcaagatgttttcaaagagtcatatgattgagtctaatgttataattactgtaaatttaatgttttatcaaagcaagactacggcttatatttatatggttatgtagtcattaagattttaccatataacaaacaaaattgcatatacaaaacagaaggtgcactgaaacctatgagaaagtgatgctaataataagaagatgatactttttatgagaaaaagataccttttttaattagtcattaggaagttctgttttaaagataccatttataatgatagatatcttatgtaaataattacatttgtgctagaatagcattaatgtacattgagaaaatacatagtttaattttatttgcaaaaaatgagcaattaagttgtggctagtaataagtgatattaagcataggagtgtttggtatgtataatgaatattataatattaagaaaataatagaaggggtatatcatataagtgatcccaataatatatgctgtacattaattgtgggaagtaaaaaggcattactatttgatacgggttatggaattggagatttaaaacaagtaattaaatctataactgatttgcctattgttgtagtcaacagccatgggcatcttgaccatatgggcgggaactatcagtttgatgaaatacatattcatgaagaggatatatcattagcgaagcatattcttttatcagataagagaaaatcgactgtagatagttataaaaaaaatataggacttccaaaagactttagggaagaagaatatataaatagagattgtaatatagattttattccagtaaaagaaggacaagtatttgatgtaggaggatatgaacttgaagtaatttattgtaaaggacatacagctgggtgtatttcattaattgaaaggaaaaacaagctgttgttttctggagatacaatattacagcatgtatggatgtttctagaagaaagtagaaaaatgagtgaatatattgagagccttaaaaagttaaacgaattagaggttaatattattcttacctctcattctagtgaaccctatagcaaagagttattaagtaatttaatccattgtgctaataatattaatgtttctaaaagtacaccatattttaatgaagcatatccatataaggcgtttatgtattctgaaggtggagagccttttgttacttcagactatgtttctattgtatttagagaggataaattgtaatattgcaaaaatttaaagaataaaaatcataaatatatgctcgcctttatagaaacagctaaaatgataaaactgtatttataaggtgagtattctatttttaatacattttaaataacgcatatatttatgattataagaaaatgatgtattttataagataaggatacctttttttagtgaactataaaaaagtcctgttaaaacgataccatttataataatatgtcacttatgtaaataattacatgtatgatagaataacattaaagctgcagcaataacagtgaaatatctggtgcatttagcactatataaaattaggaggatatttatgaaaaatagaaaaaaaatcattagtattttatgtgctttttcaatagccacatctatgtttgtaggttgtggaggtgcttcaaaagatgctggtaaagatagtagcaaaggagatcaggtaactctaagattctcttggtggggaagtgatacacgtcacaaggcaactttagaagcaatagatttatacatgaaacaaaatcctaatgtaaagatagaagcagaatatggtggagttgatgggtatcaggataagttatcaactcagctaggcggtggtactgcaccagatcttattcaagtggacaatccttggatttatgattatgcaaaacaaggagaaatgttttatgatttaaatgaatttaaagacataattgacatgagtggattcgataaaaaattcttagatggatattgtacacttaatggaaaaattcaaggtctaccaatggggttaaatgcattaactatagtgtacaacaaggatataatgaaaaacgctaatgctgatataactaaggatttagattgggacaaattaattgaagaaggcaagaaagttcatgcacaaaatagtaacaattatttattaaatgctgaacaaaataactttttagattttattattatgccatatgttattcaaaagactggtcagcaatgggtaaaagatgattatacaatgggatttgataaagatacacttactcaagcatttgaacttgaaaagaaactatttgatgaaggtattgtacaaccagcagaacaaagctttacattcaaatctaagccagagcaaaatactgcatggataaataagcagtttggtgggactattaattgggcagctggtttaggtgtacttcttggtactttaggagatagtgctgatgttacattattcccagtacctaaagatgcaaaaaattcaggaatagtagtaagacctgcgactttactttgcattaataaaaaatcgcctaatgcaaaagaagcagcaaagtttatgaactttttcttcaatgataaggaagccgctaaaattttaggagatgttagatctatacctcctgtagaggcttcaagaaaggctgcattagatgcaaacaaagtaaatccattatcagtaaaagctgttgagcaagcaacaaaaaatccagggctaatatacaatggtgtttctagtaattcagaattaagaaatatattattaactgaaattgaaaatgttgcgtataaaaagtttacacctgatcaagcagcagacgatatgattaaactttatgaaagtaagctaaaagaattaaagagtgctgcaaactagaattaattagtcaatgtagtaattagaagcttcagcatagatattaacccaattgattattggttgtttctaatgaaagattaatatattatgctggagcttatctattaataaataattagcattgtaagatattaatataaagtaaaggtaggaggtttttacgtggaacaaagtacagcaatagaattaaaaagtagtcctcaccataaaagaagtaagacattaaaaaaatacacgggattattatacatagccccatggctattaggttttcttggttttcagctatatcctttagtttcatcattttattattcatttactaatttaagtttaggtggaacccctaaatttgttggtttagataattatatacgtatatttacagtggatccagagttttggaaatccttaagtgtaacaattgtatatgtatttacatcagttcctgcaaaattagcgtttgcattactgattgcaatgatattaaactcaaaattaaaatttataaatgcttttaggactatatattatattccatccatacttgggggaagtgtagcagtatctgtattatggcgtttcttgtttatgaaagaaggtacaataaatcagattttatctgtattctcaataccacctcttgattggattggtagtcctagcttggcgttattcacaatagatatacttactgtttggcagtttggttcatctatggtgttgtttcttgcgggcttaaaacagataccagcagaactatatgaagccggaataatggatggagcatcaaaaattagaatgttctttacaattactataccaatgttaacaccaatagtattttttaacgttattatgcaattagttggagctttccaagagttcacatctgcttttgtaataacaggtggaggtcctatgcaatcaacttatttatatggaatgaagttgtacttagaagctttcagatattttaaaatgggatatgcatctgccttatcttggattctatttttaataatattagtttttacacttataatatttaaatcttcaaagaaatgggtttattacgatgatggaggcgagttttaatgaataaaaagtcaagaagcacaattctaagatatgtaattttagtagtagttggaataatcatgatttatccagttatatggcttttctttgcttcatttaaaagtaatgatgaattatttggctcggcatcattacttcctaaagcatttacatgggattcatatatacaaggatggaagggaagtggacaatatggatatagtacatttttccttaatacaataaaacttgttataccaactgtattatttacggtaatttcaagtgctgtggtagcctatggatttgcaagatttaagtttccatttaaaaagatattatttgcacttatgatatctacactgatgttaccaaatgctgttgttatcattcctaaatatatgctatttagagatttaggctggattgatagttataatccttttattgtacctgcaatttttgctggatatccattttttatctttatgttagttcagttttttagaggtattccgagggagctggatgaagcggcaacaattgatggctgtaattcctttacaattttcttgagaattatgcttccacttagcaagccagcactattttctgcaggaatatttcaatttatgtggacatggaatgatttcttcaattcattagtttatattaatagtgttaacaagttaacgttgcctttagcacttagggtatctcttgatgcatcagcttcagttaactggaatcagataatggctatggcactagtaagtatattaccttgtatactaatattcttctttgctcagaaacattttgtagaaggaattgctacaacgggtatgaagggttaagttattattgctattagcgaccaaagcatagttaagttatgatagctatgcttttgtattttaggcataccaaaagaatgaagcttctattttttagataacaacgacgattagagatgtgaaagatataagaatatctaagaaggatgggagagcatattaaattataaatggcaaatatgcatggaaaatgcagtcatacgaataatgagtggaggttaattaacatggaatttatcatgacggcaagaagtaaggaacaagagaataccgattatctcacattgcatgaacagggattaaatgcgtctgtagagatattaggcggaaatgggagtataaagaatccatttcatgcaaaagtattgattaataacgaaaataatgcaaagtggtatggagttattcatgttgaattgccattcaataaagtaaatccacgctatttcatgccagcatttatgtatggtagaaatcgtggtgagtgtccacagaatgttcctaatgagtttccaaggcttagagaggagacgaagcgcccatcctcaccttggtggatggtaagaggcgaccggttatctcatccagtagctttggtatatgacagtgataaaatatacggatttagtgcaagcccatatttcataagtaaaagtggaataaaacagcaatggaaacctgaagttgaaggtgaattttatcaatatgcaggatatacatgttcgttaactaaaggaactgtaggctatacattgggttatgaaaatgcaccatggctatttataaaatcacatgacgttagagaaagagcaccactaggtgagaattgttttgaattggagcctggagagactgttgaattcacattggatttatacaaatttgactctaaaacgataatggatgttaatgctgtgattgaagaggtatattatcattatcatcagaatccaagaaaggccagcgatataagaactacagttgctgatttggcccgtgctgtttataaagatgcatggcttccagaagagttaagttattctggtcaggtttttgaagataaggatactggaggatacagatataacaaaattatatcgattacttggactaatggattatcagtagcaacacctatgttaatggcagctctgcgtcttggggatgagtgtatgcgtcagcaggcactatcctgcatagaaaatattataaaaaactccctaaaccctgctaatgggttgccttatgaggcttatagtgatggaaaatggtcagttaatggatggtggttcgatggtatgcatacaccaggacatagttcctacttaatagggcagtcactattttatattcttaaggcttatgattatgaaaagaaacttaaaaactgccttcatgaggattggatggtatttgtaaaagaagttcttatgaaagttgaaaagacaaaaaatactgatgaagaatatccttttattttatcagagaaaactggagcaggtattgaatacgattcgtttagtggcacatggtgtatggcagccttaggatattattgctatgttacaggagacaaatcacatatagatagcttaaggaaaagtgaaaagcattattatgaggaatacattaagcgtatggaatgttatggagcaccgctcgatacagataaggcgactgattcggaggggattttagcatacataaaagcagttaaattcctacatacattaactggcgaaaatcaatatttagaacacatgcgagatgcaatatgctatgagttttcttttaagttctgctataattctcctgtcaaaatagaaccacttagtagaattggatggtccagctgtggaggaagtgtgacatccattgctaatcctcatattcatccaatgtcaagtaatcttgtagatgaattgctatattttgtggaaaatagtgaagatgaatatgtaagaaatcgtatgatggatgtaataggctggggatgtcagacctataacacatatgatagagaatatgattatggaaaaaaaggctggatgtctgagcgattctgtcattgtgaagggctagtatcagaaaaatatagtgacggttcactcgctagtacgtggttttgcctaatgccatgggcaagtggatccattatagatggtcttgcaggatgttattgggataaatgtttcgaatagaaagagtttataatgcatataagttctaattaattaaattactaaacgattgaattatttcgcttaacaggatatttaataaatttagatttgagaataaataagaggtaatagagatgcttaatcttggatttaacatacaaaaataaacaaagaaaaggtgagaaatatatggaaatgacattaagatggtttggaaaagaagcagattcagtaacactggaacaaattaggcaaattcctggagttacaggtgttgtaacaactttatacgatacaatgccaggagaggtttggcctcatgagagaattaaagatatgaaagcagaagttgaagctgctgggcttagagttgcgggtatagaaagtgttaatattcatgattcaatcaaagtaggcacaccagatagagataagtatatagctaattatattactactttagagagattagggcaagaaggtattgatgttgtttgttataactttatgccagtatttgattggactagatcggaccttgctaaagtaagacctgatgggtcaacagtattatcttatgatcaagagcttgtggataaaattaatcctgagaatttattatcttcaatggattcaaaatctaatggctttatgcttccaggctgggagcctgaacgtatggctagaattaaagaattatttgaaatgtataaggatgtagataatgagaaattatttagtaatttaaaatatttcttagaagcaatcatgccaacgtgtgagaagtacaatataaaaatggcaatacatccagatgatccagcatggccagtgtttggattaccaagaattatgacatgtaaagaaaatttattaagactagtaactatggtagatagcccatgtaatggagttactttatgcactgggtctttaggatctaatatgaataatgatattcctgatattataagggctttaaaggggaaaatccattttgcacatgttagaaatattaaacatcatgcaccaggaaagtttgatgaagctgcacatttatcctctgatggttctttagatatgtatgaaattatgaaagcattatatgaaataggctttaatggaattgtgagaccagatcatgggcgtatgatttggggagaagtagctatgccaggatatggactttatgatagagctcttggagtagcatatttaaatggaatattggaaagcttacagaagtcaattacaaaactatctaaaaataattaataactaatagtatactgaaaatgtggaggtagttaagatgatagataaaaaaagtaaattatattcttgttggctaagctacagtaatattaaaaacagtaagtataaagaatatcttgaaaatatcttgatttcctgtaaaagcgaaattatagattcggcattatctgaattaggaagggtatttaaagaaatttatgatagtaaaaagactcaagcaatttacgaaaatgaaaaagacattaaagatattagctatattaaattggagaaaaatcaagatgaaagtttagttaatgatggatataagataaaacatgagattattaatggaaaaaatgaatgtataagtatttctgctaagaatgataatggtattctttatggagtgtttgctttattgcgcttacttgaacaaaataagcagcttgaaggaattgaaatagtagataatccagagaaagatcttagattaataaatcattgggataatggagatggaactattgaacgtggctttgctggtgcttctgttctattcgaaagctgcaggaacaaagatattatgaaggaggttatggatgaaataggtggcataacagcaactagaccagccttaagaaaagcgtttaatgatgactataaggtagcttctgatttagatagggttaatgattacgcaagaatgctttcctctgttggaattaatggagtaatcataaataacactaatgtccatgaagcagagactcacttaatggatagtaaaattgatattgtaaaaaatattagtgatatatttaataaatggggaattaaaacttatttgagtataaattttgctgctccaattacattgaaggatttagatacttctgatccattagatgaaaaggtaaaagaatggtggaagaaaaaagttcaatatatgtataaagtaattcctaatttgggtggtttcatggtaaaagctgattcagagggaagaccagggccatttacttatggacgtaaccatgcagatggagctaatatgcttggagaagcacttgcaccatatggaggaatattaatatggagatgctttgtatacaactgcaagcaggattggcgagatcattcaatagatagagccaaggcagcttatgattgctttaacccattagatggacaatttgtagataatgtatatctacaaattaagaatggtccattggatttccaagttagagaaccagtatcaccattatttggggcaatggataaaaccaataaattattggaacttcaaataactcaggaatacacagggcaacaaaaacatgtatgctatttaattcctatgtggaaagaggttttaaatactcgcacttacgcaaatggtaatattgaaagcagtgttgctaagagagtcagtggaattaatgcaatagttaatgtaggaaacgatgaaaactggactggtcacttcttagctcaagctaatctttatgggtatgggcgtcttgcttggaatagtgatattactagtgaggcgattgcagaagaatggataactctaactcttggcaataatccagtagttatgaaaaacgtaaaagatatattaatgaattcctgggaagcatatgaaaagtatacatcaccccttggaataggttggatggtatcgccaggacatcactacggaccagatgtagatggatatgaattttcgccttggggtacatatcatagagcagactgtaaaggcgttggaattgatcgtaccattgaaaaaggaacaggttattcaggacaatataatgaacctcttaagagtaaatataataatttagaaagctgtccagatgaattattattatttttccatcatgtaccttatactcaggtattgaaatcaggaaaaacagtaattcagcatatctatgatacacattttgagggcgttgaaatagtagagaagtttatccataagtggaatgaattaaaagatataatagatgaaaaggtatatgagcaagttcttgaacgactcaatatacaactatatagcgctagagattggagagaccaagttaatacgtatttttataggatgtctggaataaaggatttaaagggacgaaaaatatattaacgtatttctgagatttacctactaggttttgtaactctgataatatagtttttatataatcatattatgatgttttattggtatttactttttttgtgataatgttgaaattttggcgtaaatgccacctaaaaaattttaaaaatatcttgcacaatgaaaaaaaaagtgatattatgaaaacgtagtctagagaggggtgcctagaaagggcttttagtagactataatgaaataataatatctagcatgttactgattcgatcaggcataagcatagagaagtaaaatgaagtaatatttattcgttaaaacacatattttgtacagtttttatagggtattatcatatttttttatgatttaattttagtgtacaaatattgtgacgatatacgaatatatactattgttttatttccaaatgcttatgccttttgtttttgtaacaaataaaaaataggaggtataaaaatggtaggaattattcttgctagtcacggagaatttgctaaaggcatcatgcaatctggtgcgatgattttcggagaacaagaaaacgtaaaagctgttacgcttatgcctagcgaaggacctgatgatcttagagcaaaaatgaaagatgcaatcgcatcctttgacaaccaagatgaggttttattcttagttgatctttggggtggtacaccattcaaccaagcgaatatgctatttgaagaacataaggacaaatgggcaatcgtagctggtttgaatttaccaatgctgattgaaacatatggtgcacgtctttcaatggaatctgctcatgaaattgcagcttatatcttaaatgcaggtaaagaaggagttaaagttaaacccgaagagttagaaccagcagatactggtaatgcttcaggagcgggagcagggcaatctaatgcaggtgcaccaggatcgtttgaatacgttttagctcgtatcgactctcgtttacttcatggtcaagtagcaactgcttggacaaaaactgtaaatcctacaagaattattgttgtgtcagatgatgtagctagagatactcttcgtaagaatttaattacgcaagcttctcctccgggggttaaggctcatgttgttccagttgatcatatgattaaacttgcaaaagatgataagcattttggaggccaacgtgcaatgcttctttttgaaaatccaaaagatgtgcttagagctgtagaaggcggaataccgctaaagacaatcaatgttggttcaatggctcactctccaggtaaggttcaaccaagcaaagtgttagctttcaatcaagaagatatcgatatatttaataagcttaaacaagctggacttacttttgatgtgcgtaaagtaccaaatgattcaaaagcaaatatggacgaaatacttaaaaaagcacaagatgaattaaaaaaattaaaataatctagttatttagagaaaaaggaggattaataaccatgactttaaatatagttcaaattatattagtcattttaatagcatttttagctggtgtagaaggtatcttagatgaattccaatttcaccaaccgataattgcttgtacgttaattggcttggttacaggtaatttactaccatgcttaatcttaggtggtactcttcaaatgatagccttaggttgggcaaatattggtgctgctgtagcacctgatgcagcattagccgctgttgcatctgcaatcattttagttcttggaggtcaaggtgaagcaggagttgcttcagcaatcgctattgctgttcctttagcagttgcaggattattattaacaattatttgtcgtacacttgctacagcgttcgtacattttatggatgctgctgctaaagaaggaaatcttagagcaattgatatgtggcaaatcgctgctatttgtttacaaggtgtacgtattgcgattccatcagctttaatattagcaatcggtgctggtcctattagttcattacttgctgctatgcctacttggttaactggtggtttagcaattggtggtggaatggttgtagctgttggttatgcaatggtaatcaacatgatggctacaaaagaagtatggccattcttcgcaattggttttgtattagcaactgtttcacaaattacacttatcggacttggtgcaataggtgtagctttagcacttctttacttagcacttagcaaacaaggtggctcaggtaatggtggaagttcaaatactggtgatcctttaggggatctaatagatagatactaagaagggagaggaaacgaaaatgtcaaaagaattaaaattaacaaaaaaagaccgtatttctgtttggttccgttcatttttccttcaaggttcttggaactatgaaagaatgcaaaatggtggttgggcatttgcaatgattccagcaatcagaaaattatataagactaaagaagagagagctgcagcattagaacgtcacttagagttctttaacactcacccatatgtagcttcaccagttgttggtgtaacattagctttagaagaagaacgtgcaaatggtgcaccaatagataatgtaactattcaaggtgttaagattggtatgatgggacctttagcaggtatcggagatccagttttctggttcactgtaagaccaattttaggagcattagctgcttcacttgctctaggtggtaacatccttgggccaattatcttcttcttcgcttggaatatcatccgtatggcatttatgtggtatacacaagagtttggttacaaagcaggatctcgtattagtgaagatttatcaggtaatatgctacaagatattacaaaaggagcatctatccttggtatgttcatcttaggatcgttagttaatagatgggtatctgttaaatttgcaccagtagtatcatctgttaaattaagtgatggtgcatttattgattggagcaaacttcctgctggagcagaaggtgttaagcaagctctattacaacaagcatcaggtatgtcattaactgatactaaggttacaacattacaaaataacttagattcattaatccctggatttgtaggattattaattacacttctttgtatgtggttacttaagaggaaggtatctccaattcttataattcttggattgttcataattggtattgttttccacttgatcggtttaatgtagtacttttttacttagcctaggctttttagcctgggcttttgttaacaatattaatcgtgttacttttaatagactttggaataattgataaaaacatgtaaagaatatataataaaaataaatgtgtatataagtagaaaagaggtagataggatggttgagtcactcaatacaaaggttgatctagcaattgatgcaacatcttttgctggcgttgcagattacggcaagattatgataggtgacaaaggttttgagttctataattctcgtgattatcgtaaatttattcaaattccttgggaagaagttgactatgtgattgcatcggtattatttaaaggaaaatggattccaagatatgcaattcgaacaaagaaaaatggaacatatactttttcttctaaagaagcaaagaaagtacttcgtgctgttagaaattatgtggatccaaatcatatggtttattcattaagttttcttgatgtagtgaaacgagcactgaaatctacatttaagaagaagagctgatcgactaaagaagtcatcatgtttataaagtaaaaatattcagatagagctttagagtaacagttgaatttagttgaacttatgcaaaaaagagtattttgtcttgcatttttctttctaccatgaaacccactaaaatagatattagattttagtgggttgttttaatgtaaaatattcaaatatttatcttgatttcatagagcaatgctaatttacaaaagtaacctctaatggatttttatcgactaatcttggataagtatatttaggatatcccaccataatagcaccagtgattttcttatcttcaggaatgttaaataattcaagtaatggagaattatctttcatagcaattctttcaaacatcccagcccaacatgatcctaagcctagtgttggcgcatatagctccaaatatgttaatgaaaggattgaattttctcttcctcgtggaaagtttgaatcagcagttgctaagacaaggctggatgctccacgcaaaattgtatcaattcctttttcacggtatggttttgtaaattcactcgatacattaaccttttcaaattcttcaataacaattttaacagctttatcaagtatctttctatcatcaatgatagtataagatattccttgaagattatgtccactaggagcaaaatgtgcaatattcacaagatctattaatttttctctttgggcaggagtttctttatatgaacggattgaacgccttgaacgaagaaagttttctgcttcctcaggacttagttttggaaattttttcgagctggtttgattggctaatggtgtttttatattatcaattgctttcattgggcatatagctacacaatgaccacaggaaatacactcatcaccgcaaatttctttaggtccattttcactaagttctaatacacgttctgggcactcatttacgcacaaaccacatttaatacatttatcttgatttacagttatcaaattcatttttatcttctcctttactttaaacatattcagctaaataataaggtttatttaatagtattatcgtaatgaaagtaaattctttttaatccattatacaattaaagaattcttttaaatagatgataaattatcataggataaatagtcatggaagtattactactaaataattttttaggaatatcagcttgttatttttgtattatattttgaagcatttcacaaattactgatgagttggttgattttcaggggtaaatgcacttgaggatttagtattattttctctatttaagagaccattagtgattaaataataaacacacgctagtaaaagtacactgcaacttgcaattgtaattccaataacaccaaatgaatgatatacagaggtacttatccatgatccaagggatccacctaagtaatatccaaccatataaagggaattcaatctactatgattttggagactaagcttataaatccttccttggtttaaagacatattcatccttgaaccaacatctaaagtaaaggtcacaagaattataattataagtttagaccagcctatacctaagattaaaaaagagacaaacattatagctaaagcaaaaaggttccataagcttacttttttgctatttgtaagttttcctgaaaatccagcagctaacgcacctgctatacctaaaaagccaaagagtccgactattgcacttccataattataaggagaaccttctaaaataaaagacaatgaaacccagaaaatattaaaggcacaaaaggcagcagcaccaaaaactattgtttctcttaatactttttctttttttaataatggaggtaaagataatatgatatttttataggaagtttccttttctatattatcctttggaagagaataaaataaatatattgcaaaaattagtaaaactattgccgcaaattcatgaactcctctccagccaattaattggcctagaactccacctagtactcttccgagtaaaactccaagaaatactccggttaataagtgaccaactattatacctcgtttttctgacgaaatatttgaagaaacaaatgggattataagctgtgctgaaacacttgaaatccccataaaaaagcctacaattactattaaattaaaggtagagactaaagtcattaaatataataatatagctgaacaaataatacttaaaatgattaatagttttctactatacctatctcctagtggaacaataaacaataatcccattgtatatcctatctgtatagctgttacaagcttaccagatgatgaagcaggtataaaaaaatcattggaaatattggttaataaaacttgatcgtagtacaaattagctaccataattgcacaaataattgataaaataaataataatttgtttgaaaaatttttgttttctaaagctctattcattttcacatcttcctctctatagcttatgaagatagtgtataatgaaagtattattttaaatagaacctaagttatcatatgattaataatactatgtttggcagaccttaatcataattctaaaaatattgcaagaattttagccgaaattgtgaaatgtgcattgtgaattacaatatatataataataaagtttatatgaatagagatggggcggtaataatgatatctaaaaataaagaacttggattatttttaaaaaagaaaagatccacattaagaccagaacaatttggactcaaatttgataaaaaaagaagggtgaaaggattaaagagagaggaagtcgctgatttagccggagtaagtattgactggtatgtgcgtattgaacaaggacaagatgttaatccatcaatagatgtgttgctttccttaagtagggttttgcaattaaataatgaagaaaaaagatatttatttaatttatcagataagaaattacctgtagaagacttcgcagctgttactatttctaatacattacaaaaattcttagacaatcaaaatccaagcatagcttatgttactgatagtaaattaacaatgattggatggaatatggcggcactaaaagtctatggtaattatgaagaaatggatgaaaaagaaagaaactcggtttggagagcttttaatgatgattatctaaaagaactgttagataattgggaaggacattctaaattacgtgttgaacaattgagagcaaattacggctattatgagaatgataatacaataaatgcaattataaatgaattaaatgaaaaagatcctctatttaataaatggtggaacaatcaaggtattatgggaacaccagaaggtcaaaaacttttgcatcatcctttagtaggggatttatacctaagttatatttcatttaggtccacagaaatagagggagcaagtatcaccattcaaatgcctatagatgatgaaacaaagaataaattaaagcagcttatcttagaataaataatattcatcattaagcttattgctcttaatggaatcataattatgccatatttttagcataagaattcagaataatgtagcacgttatttctttcctgtaatagtcataaaagctctgtaaattataaattgatttatgaagtcaacttgtaataaaaacgaaagtgagttataattgttgataatatcaattaatttggaggcgaatatgagaaacgaagagataattagaaaagaggtaagattaattgtgagagaattagggctgcttaatcacaattgcctaaattctgaattaacactggctcaagctcatatattaaattacataaaacaaaatggaaaaactccttttaatgaattgctaataaatttaggtattgataaggcttcgttaagcaggatacttaataatttggaggctaaaaattatttggagctgaagaaatctgaagctgataaaagaatgaaagatatttgtattcttccattaggtattgaggctataaatagtggagaccatgaagcaaataaatttattaatgaaattttaaatttaggggatagtgaagatacagaaaatattgtgggagcatttagattatttcgcgttcttgcattaaaaaacaatctcaagaagaatgattctagaatattaatagaaagaatttctgaaaattatataaaagaagcaattgaattagcaacagaagtatttactaatgagcaaagcattccagaagaattggttccagtgagtgaaaatttaaaaccaatttggtggtgcgcaagagtaggagaagatattattggagtagtatcagcatggaaagaaaaagataaatggcattggggaagatttgctgttgataaaagattgagaggcatgggaattggtcagaagcttgctatagtttcattaaaagaaatttttaattcttatactgacgaaatttacattgaagcaagagatgcaactctaaatatgttaatgaaatttgaatgcaaagtaattggagaggcagaagatttttatggtgaacctgtaactccaataatattaagtaaaagtaattttattaagagatgtaaatagagaaaagaatcaatttaattagtagcaaaagattattttaaaggtaatattattaactatatcataaaaaaacacgagaatctaaaattgaactgccccctgtcaagtagacagatgaaaaaacaaaaaattatgaaaccaaggtctgatttcgatattcaattggagtcagaccttttaagtttttctgtagtctttttgtattatagaaaactatgtattcatcaattgcttgtctcaattcttcatatgtataaaatttttgcaaatagtacatctcacattttagagttccccaaaaaccttccattggtccgttgtcgatacatctgctgacacgtgacatgctttgagttgctttgattttatcaagtttagctttgaaagtcctattagtatactgaaatcctctgtcactatgaaacagtggctttgcagtcggattagcacttactgctaaatcaaatgtatcaaaaacaagctgattgttatttgagtgaccaacaacataagaaacaatgctcttatcagctaaatcaaatattgcgctaaggtaagcctttttaccattaagtagtttaaattcagtaacagctgttaaccatttttcatttggtttctttgcataaaattctctatttaatttgttttctgctgtaatttgtggagtactttgaatataatgctttctcttttttcttataactgatctcatgttaatagatttcattaatctataaattcgtttatgattatactgtttatccaggagtctatttatattcattgttatccgacggtatccatagataccatttacatcttcataaagtttaacaatctcttttagtattattgaattttccttatctaattcagtctctgaacggttaatccatttgtagtaagatgatcgtgcaatcccagctaaattgcatagatcagccattggatagccatttttttcatgtaattcttttatagaaatatatttatattcttggagtcttttagtgcttatcgccttctttctacttctttcaatttttttaagaaatcaatctccatctttaaacgtctattttctgcttcaataagttttaattgtgcggataatttatcagactcagtaatctcatcagtatctttacgcttaccgcgacggtctattagctcttcatatccattagctttgtattttcttacccaggtataaacttgttgataagaaacattaaatttatcagcagtagcttgataatcatcattattcgaaatgcagaatgcaacaatctcaattctttcttcataagtagtctttcttccattagtcataattctatccccttgcttattatgagatttaattgttttatgaccattatacttcttaatccaatcgctgagaacacgaggagatgaaatttcatatgtgcagcatatatttcttaaagagccttttccagctagataatctttaactgcattaagtttaagcgaatcgcaataatatttgttttttgtagaaactattaaatttgcttcaccaacatcattatatattttcaaccagtcataaaatgtggcactatgaattcccatctcatcgcatatctgtataactgctttttctcctgataggtattctttaattcctttcaatttctcttccagagaacatttcgtttttcttgacattaaaataccccctttatagaaacagttttattattttaactgtctactataaagggagcatatcaaaatttagattttcgtgttttttagttatttctaaggttattttagttttcaaaaagttttagaaaaaaatttatagatattctgttattttatgaattgagacatatatcttaattgaaaagaatagaaaaataaaaatttttaggaggagcaattaagatgaaagagagaagatatgtaagatttagagttgatatgtatgatgatacaaaatttaaaataatagatagaatgccagaaagagatgttatttattatatctggactagaattgtaattttagctgggagagttaatctagatggcaacttatatatgtcaaaaagcattccatatacattaaagactttagctatagaatttaatagggatgaaagtcaagtaaaattggcattagatacatttatagatctagaaatggttgaagttattgaagaaaatgtttataaagtaaagaattttgcaaaacatcaaaatatcaaagaaaaggttaaagatattactgaggataaagaaaaaatgggtaaaaaggatagtaagttaaaaagcgaagagactaaaagtgttgaaaatatctatgatgaaaaacatgatattgaagaagagcttggcaatgaaattattgaaaagcaacagcagaaagacaacaatatgtgtaatatggagaatgcaattgatactaagaataatatagaaattaaaaatgaaggaatcagcgataataagaacataataagcacggggaaaattaatggtgtaccgaaaggcaatatacctgtacctttagtgatgaataaaaataagaagccgaagaaagatataaagaaaaatacggatattgaggttactgatgatgaagatgatgatgaattcggtttttatgaaggagatagaaagcctttaggtaaaggcgaaagtgtatttagtgagttttctttttagctcaaaaagaaaaatacgacttaatatttgatttacgtgcaagggtgagattcataactattccccacgaaattctgatttttcatgggggatttagccaatattttaagttcttttatagggtgtatttaactcaatcatttcgataaattttgaaagggaactagtcattaaagaatctttccgccttataaaaaatgtttttgtagtattgtatttatcaggtactgagaatgattttagaagtcctttctttttataatcttcaatagtagacttgggtacaaaggatgcaccaagatcagcaataacgccttcaataatagaagttaaattattaaattccatatatcgaatattatgaatgcttttggatttgagccagttttcaagctgtgttctattaggacatcctgctgtactcatcaaaaatggttttgaatataaatcttctatattatcatatttaggacttgatattagaactaaggtttcttcgactacaagttcacttacgatattctcatcactaaaggactgagctttgacaaaagctccatctaactggaagtgttttattttataaataagttcatctgattgacttgttataagagacagatcaactttagggtaagctttatgatactgagataagatttcaggaagacgtattgcagatactgtgtgaacagcaccaattgataaacttcctgaaggatcgcaacaatcatttaaggctttatcagcttcatccaataaataaatgattttttcggcataagctagtaatttctcacctgtaggagttaaaatcatacctcgctgtctataaaaaagttgtgtatttaaatcagactctaattgttgaattctagctgtaacattagattgaacatatcccagagcctgcgcagcctttgttatgctgcctgcttgggcaacagctctgaaaattcttaattcactactttccattttatcactccaatatataaatcactaaaagtgaatcttgatatcttatataatcattttacatgatatataatctcttgtaaactatgtatagaaaacaaaattaaatggcttcgatgggatcaatcatataaggggttatctacactcgaaaatttattccatttataaataaggagattatatgacaaattctaaatcacacaaatggagcattctacttgttgttacattagtttcatttattacaaatttagattctactattgtaataataggtttgcctaatatgatggaaggattaaatatttcagtaactactggattgtggataattactggttacattattgcaagtacagttttaatattgcctgctggaaaatgggcagatacagttggaacaaagcgtattttcatgttaggacttataatttttgcagttggtacaatactttgtggaattgcagactcaggattgactttaaatttatataggttaattcaaggaggtggagcagcattggctatggcaactgcaactccaactataattaagacttttcatagtaatgagcttgggctagccttgagcattaatgctacttcatgggttattggagcaataattggaccagtagctggtggtgctttaattagcagctttggttggagatcaatattctttattacagtgccttttgtacttctttgcataattggagcatttttagtaatggaagagactaaacctaatattaatcaaaaaaatgactggattgggatattaacatttagcttaggtttaatattaacgatgatagtactttcagaaggacaatcattaggatgggtatcatatgaaactttagggctatgtatagttacaattttattatgggttgcatttataatcacagaattacgcgtagaaaatccattatttaatttcaagctgctcttgtacagaaattattcaattggacttataattacattattttattgtattgcatatttttcattacctttattgttgagtatatatttgcaaagtgcattacatttaagtccaactatgtcagggctattaatgatttcactatctgtaccacagcttatattaggtccatttgcaggtaaacttgtagataatatcggatcattaaagactcttacatttggaattgtatttcttattatagggatattctttcttggaaatcttgggggagagctatcagttaaagctatagttacaccactaatattattatcaatagcaaatggcttagcttggccgtcgttagcgaaaactgtattgtcagcagtgcctaaagaacaatctggttcagcatcagggatgcattatactataatgaatgttggtaaagccttaagtcagacattagccatattaacaatagaagttattatacctgcggatgtagtctctaaggcaattataggtttaggaagcttttctaatgtaaatataagtggaaatttagttaagtctatagattccagtttcagattttttacaattttctttgtagttgcactagggttaagtttatttcttttatattctaaaagaggagagaatattaaagaaagagttgatatggcataggttatggcacattatttagtaatttatatctttagatatcattaaatgggcaaagaaaagtgattgcaaggttttaatcacttttctaatatccaagatgagcattttatttgaattagacttagaatataattattaaaaaggaggattaatatggaaaatgtaattgaaaatataaaatcaagaagaagtataagaaaatacaaagaggaacaaataaaagatgaggaactattcacaatcttagattcagcaaaacatgcaccaagtggaggtaactctcaaacatggcaatttactgtagttcaaaataaagaaattcttttagagttaaatggatatattaaagaagcttttgaaaagcttgaagttgatgaaaatacctataaaagtaaaaaggcaggcaaagttgcatcgaagaaagatgactacaatttttattacaacgctccaacattgattatagtatcgaatgagtctaactatagtaatgcaatggcagatagtgcttgtgctatagaaaatatgcttttagcagcaaattacttggaacttggagcatgttggataaatcaattaacatggtttgacaatgatgaaaatgtaagaaagttacttacacgcttaggaatttcagaaaaacataaggtttgcgggtctatttgtattggctatatagatggtattaaaccagagaaaaaaatattgaaggaaaatacagtgacaattataagataatagggaattatatttatattgacttataaaatattatttttctaatagatatgtatctgtaaagagagtatttctatttcatcataaacccgcaagaatctgggaattaggttcttgggggcatttttatttgtagatatttaaagaataaatctatatttttaatagttgcaatatatagtataatagttgttagaaatcaggaaagaaattaatatttatatttaataatttctaataaatgataggtgaggaacgtaaagagatgacaatggaattagagaaatactataataaattttgtgaagataaaagattaactagaaaatatgcacaagttgagtttttaacttctatgaaatatattcatgagtatctagaaaagaataatggttccaaaattttagatgttggtgctggaacaggaagatactctgtggagctagcaaatgatgggtatgatgttacagcaattgagcttgtaaagcataatctaggtattttgaaatcaaaaggaagttcagtaaaagcatatcaagggacagcattagatttatcaagatttgaagaaaatacatttgatatgacattggtatttggaccgatgtatcacttatacaattttcaggataaagcaaaagccttacaagaggcgaagagagtaacaaaaattggaggagttatcttagtagcttattgcatgaatgaatatagcgtaataacatatggttttaaggaaaataatattcgttcatctattgaaaatggaaagcttactgatgattttcatgttatatctgagccaaaagatttatatgattatgtaaggattgaagatatcaataagttaaatgaagaagtaagactaaaaaggataaaattaatttcagcagatgggccagcgaattacatgagatctgttttaaatgctatggatgaagagacatttaagctttttattaactatcatatttctacatgtgaaagaccagagttgcttggagcaagtgcacatacattagacattttaataaaggagtaggaaaagagagtaagagagctaaattttaattattaataagaaataaatatagcacctttttcaaatatgaaaggtataatataaaataaattcttaacaaagtgtttgttttatattatacttttttgtctttaaataaaaaaatttataatattatacaggaacaccatgtaatttcaatatttagcaataattatatggataattattattgttaaataattattttatattgaatgcaattaatttagtgctataataaaattataaaagatcgattatatgaggaaaaaaggtgtttattatgaatgttaaattagaaaatagatatagattatttattaatggagaatggagagatgcttcagatggagctacaataaagacttataatccagctaatggggaatttttagctgagattgcagatgctacagaaaaagatgtagatgatgctgttaattctgcaagacaagcctttgctacatggggcaaaactactgttgtagaaagagcaaatatattaaataaaattgctgatattattgaagaaaacgcagaatacttagctacagtagaaactttagataatggaaaaccaattagagagacaacaggagcagatattccattagcagcagatcactttagatattttgcaggtgttattcgtgctgatgagggttctgcaacaatgatagatgaaaatactttaaatttaatattaagtgagccaattggtgttgtagggcaaatagttccttggaattttccattcttaatggcggcttggaagttagctccagtgttagcagctggggatgtttcagtatttaaaccatcaagtactacttcattgagcgtattagagcttatgaaactaatacaaaatattgttcctagtggtgtaattaatgttattacaggaaaaggatcaaagagcggtgaatatctgcaaaatcatgaaggacttgataaattagcatttacaggatctacagaagttggaagacaaattggacttgctgcggctaaacgtattattcctgcaactttagagcttggaggaaagtcagctaatattttctttagtgatgcaaatatgaacattgcattagaaggtattcaattgggaattttatttaaccaaggacaagtttgttctgcaggttctagaatatttgtacaagaagatttttatgatgaatttatggaaaaagcaattgctgcttttgaaaaagttaaagttggaaacccattagatcctaatactcaaatgggagcgcaagttagtgaatctcaacttaaaaaaattcttaaatatatagaaataggtaaaaaagaaggagcaaaagtagcgacaggaggggaaagattcattgagggtgatgctaagaatggatactttatgaaacctactttacttacagatgttactaatgatatgagaatagctagagaagaaatatttgggccagttggagttgtaattaaatttaagacagaagaagaagtcattgctatggcaaatgatagtgaatatggcttaggtggtggagtatttactactaacttaaatcgtgctataagagttgctaaaggaataaggactggacgtatatgggttaacacttataatactttcccagcaggtgcaacatttggtggatacaaagaatctggtataggcagggaaactcacaaagttatattagaagcgtatactcaaaagaaaaatatcatagttaatttatcagaaactcctggtggaatgtatataaagtaatgaatattgaatcatattatatgtattagaatcaagcctctatattttaggtttaatcaggtatataacttcccgaattttaaatataaactcattactgaattatatatagattataatagccataaagacccttaatcaggatctttatggctatttaaatgagaaaagtattatttgcagtaagttaaagcaaagcattaacgccatttactttagcttgttcatcatcatctataggaattataatacatttctttccgtctattatttgtgattttatttgagatactttttgaggttttacattaagtacaatatcataatttggagcatcgctaatctcagtctctatttcagagttttcagtattgtttgcatcagattcggtttctgaatcaagactttcatctaaattagagtctggatctacttctaagatggtatcagattctgtctttaaagcagaattaggctctgactctaagatcttattcaaagctgattcggtttctgattctaaagcagcttctttttctgaatctgataaagcatccagttttgtcttttcaagtctttcttctagtatgcgtactttcttttcaagtttttcttccttttttctttgttcatttgctgcaagtgcttttttatcaattaaattttctgctacaggtggagtatctccaaatgcttctgtatatgatttttcaatctttgcagtgatctcttcaggaactccactttcgattaaaatatcttgaatattatcattactcaaaactataggttcagcatttttgccgttaacagtagtatgatcatctactatagtattgagggtttcttgaatttccataaataaatgctctgatttttcatcatcacttccaacagctttacgaattatattttggaatgtttctttttgctcagtagctgtttgttttgaactacaacctaaagcttcctccataaattcaggatgaggatcttttgcatcttttgtgtaatacataatagaatgaatatcagtactacgatctataaatgctggaaatacaaatccaaggtctggtggaccaactacccaatctctaatacgagctccaattcgattttcatcttcaagatatccaagagctggttttgaaagtgatactggacagattgcacataatatatattcatatacctcttcagattcatctaattttgagttatccgtagtttttgtcataacatcataggcatcgtgaaaaacgagtattagaaagttaccagtatattcataactatttataatcattttataaaagctatcgagcatagaatcatcttttaatttacttttttttagctccattaaggaaagctgtctgccgcctatgccttcttcatcaagaggaaagttaagttcaagaatgttatttccaactgttccagatagtgttttcttggcaatttctaaatatttaaagaattcctcctctcttagatttaaaaaagtttctttaaattttaatacaatatctttttgaccatctacataacaaccacacattttagtaaacgtacagtcatctttttttaaacgtctttttaattctaatatatcttttttgttcataaatctccctctcatttcgccgagtttttattagatacatgaaataacatgtccaaatttgctatgaatattttatgcttggactctaaaacatttcctttagaaactcgtaatttcttataaatgttgcattttaagagtctagactctatatataaaatagactggctattgactgctattttgaatacgctttagcacatgcccaaaatacttcacataatatagtatagtgttgaattgatagctctgcaagatattaagtgaagtttaaagccatattttgtaagaagatttaagcgttcattgtttagtaaacgtataatataaaaacagctaattttatatagaaattaaaaatataaaaaatattatacgaagatatagacaattaaatccaattatgataagatttaattacttaaacgtttactgaaaaagaggaatatgttatgaatagtaatattaaaagacccacaattaaagatgtcgctaagaaatccaatgtttctgttgccacagtttctaggataataaataatctagatggttattcagaagagactagaaaaaaagtaattgaagctatggatgaacttggttatcaaagaaatgcaattgcgagaaatctcaaggttaaagaaacacgaactattggagtgttacgtcctaagataagcactacatattatgtagaaattttaaatggaatagaagattttgcgcagcgcaataattacagcgttataatctgtaatggtggagataagtgggagcgaatgtcagaatatcttcaggtattatctgaaagacaggtagatggattaattgtttgcagcatacctccagatgatactttatgcaaaagaataatagactcacatattccaacagttcttgtttcgggattatcgtacaagtattcattgccttatgttaaggttgatgattatcaggctgcttattcagcaacatcatatttaattgaaaatggccataaagagatagcaattatatctggaccgactgaagaccctatagcaggagtgccacgtttaaatggatttttgcaagcattaagagataataacatatccataaagaaaaatcttattaaagaaaaagggtttggatttatagatggggttgaaggaatgaatgaacttctagagacaggtgagaaatttacagctgtttttgcggcatctgatgattgtgctgttggagcattatcagtagcacataagaatggtttaaaagtaccagatgatctatctatagtaggttatgataacacaaatatagctgagatgtcatatccacctttaacaacagtagcacaacctttatatgatatggggaaaaagtctgttgaaatgttaataaaaagaatatcctacaacgaaaaagttgaaagcataataatgccatttgaaattatagaaagagagacagttaaaaagattaaaaatatataagttgcattaataaatgtttatttaaagttctagtatactaagtgctcaattgtgactgaaatgtaggaaattaatagtaatatatatattgcaaaaaataattcttcatcataattctaaaaatattgcaagaattttagccgtaattgtgaattgtgaaatgtacattgtgaattgtaatatatataaattattataggaatataagatttcaatgattatttatagaatagtatgaagctatattacaagtttctatatacaattctaagtttaaaactttgtaatataatttcatataagatttgagaaagatattacgtaaatttttatagtttacgtaaacgattaagtattaaggaatagaaaaagatattaaaatgtactttttaaggctgatgtgcctaaaatagtatagttaatataatattaaatctacgtaatcgtatactgaaattacaaagtagggggaagagaaatgaataaaaaattaaaattactaatgtcaattactattagtgcagtaattggaacttcattattagcaggatgtggttctaagggaggtagcacagaaaatggaaaagtaaaattagagttattttcaactaaggcagaaaataaaacaatattacaatcattagcaaatgaatttcaagaaaagaatcctgatattgaaatttcaattaattcacctgcaaatgctggtactgttttaaaaacaagacttgctaaaaatgatatgcctgatctagtagctttaggtgctgatgtaaactatggtgcactagtagatgcaaatgctctcgttgatcttactaatgatggcattattgaaaacatacaaaaaccatatttagatatgcttcatggcatagcaagtaatgataacggaaagatatatggagttccatatgctactaatgccgatggcgttttatacaataaagatatattttcaaagctaggattgcaaattcctaaaacttgggatgaatttatggctgtatcgaaaaaaattaaagatgcaggtcaattaccactttatttgacacttaaagatgcatggactggaatgtgtttctggaatgttatagctagtgacttggagcctagtaatttcttagctgataaaaaagcaggaaaaacaacttttgaagctacacatagagaaatagtggacaagatggagactataggaactcttgggcaagaagatattttaggagtatcatacaatgatggtaatgcagcctttgcacaaggtaaatcagcaatgtatttacaaggtaactgggctattagtgaaataaaaaaagcaaatcctaatataaatataggcatgttcccattacctgcaagtaatgatccatctaaaaataatatagtatctggtatagatgtgttatttggaataacaagtaagtcaaaacactctgatgaagcaaaaaaattcatagaatttatgactcaaaaggagaatgctcaaaaatatataaaagatcaattcgcattttctgcagttaaagatgtgacacaagatgatcaaagtgtaacagatgtacaagaaagctttaaaaatggaaaaattggtgttttccctgatcactactatccaagctcatttgatgcagcaagtttagttcaagggttctatagtaaaaaagataaggcagaattcttaaaacaacttgatactgaatacgataaagccagtagcaaacaataaataagagaaaataaaagtcataaggatgtcctaaaagatggccgtagcttgatatttattaataaacatgaaaaataatatttttaggaaaatagactaattttaggacaacctatgttatatgttaataatatttatttgtcaaatgaaaaaataatagggggctgaaggttttgaaaaagaaaaaagctttttatattatgactataccagcagttttgttattctttatatttcatacattatctcttttagaaggtgtattttatagttttaccaattcaaaaggatatggtgattggagttttgttggattaaaaaactatattgcagtatttcaagatagtaatgttatgcatgcgtacatttttactttcaaatttgcaattataactacaattatagtaaacatattaagtcttttaattgctgtaggtttaaactcaaaaatcaaatttcaaaataccttaaagtcaatatattttattcctaatatattaggaactttaatagtggcatttatattcaattttgtatttgctcatgttataccaaacattggagagactatgaacatttctatgcttagtaaaaacatattaggtgatgaaaagcttgcatggcttggaatagtgtttgtagcagcatggcaatcaatagcctttaatacaataatatatttatctggacttcagacaattgatactgatgtttacgaagcctgtgatattgatggtgctggttcatggcaaagatttaaaagcataacatttccattaatagcaccatttttcacaattaacatggttttatgtatgaaaggatttttaatggtatttgatcaggttgtagctatgacaggaggaggacctggaactgttactcaatcaatatcttatgtaatttataacggaggatttaaccaaggaagttttgcatatcaatctgcaaatgctgttatttacttcatcgtaattgtagcaatatcattatttcagcttagagtccttgaaaagagggaggaaaaagtactatgaggagaaacaaaaccaattggatagtaactacgcttatgatagcaggagctttggtggctataatatttccattgtatctaacaatattaatagctgtaaaatctccacaagatatggtaccaagtgctttatcatttccaaaggcattgcgttttgaaaattttactgaagccattgaaatgacaaatttctttgatgctctaaaaaacagtttaacaataacaatttcggtattaattcttacaatactctcaaattctttggtttcatatgccatagctagaaatagaaagaaaaagttttttaatgcattatactattactttttaagtgctatgtttgtaccatttccaataattatgctgcctcttgtaaaacaagtaaatatattaaacatggataatataattggaataatatgtttatacgttgtatttggactaccttttaatatatttttatattcaggttatattaaatcaattccagtttcacttgaagaagcagcaacaatagatggtgcttctacatttcaagtattttggagaataattttccctttactaaaacctattaatgctacggttgcaattactacttgtttgtggacatggaatgatttcatgctgccacttattatcttaggtaagccagaaatggctacattgcctttagttcaatacgtattccagtctcaatttactacaaattataatctggcttttgcgtcatacttgctagcattattaccaatgtttattgtatacatctttgcgcaaaaatggataagaaatggtattgtcactggagctgttaaataataaaaatgcatttaaacgaaataaaataagtaatattaaaaggagaataagtcatggataaaaaatggtggaaagaaagcgttgtttatcaggtatatcctaggagttttaatgattctaatggagatggaattggagatttaagaggaataatagagaagttagattacttgaaagaattggggatagatgtaatatggttatctccagtatataaatcaccaaacgatgataatggatatgatataagtgattatgaagatataatggatgaatttggaacaatggaagatatggatgatcttattgaggaaggaaataaaagaggaataaaaattcttatggatttagttgtaaaccatacttctgacgaacataaatggttcatcgaagctaagaaatcaaaagataatccttatagagattattatatatggagagatccagtaaatggagaagaaccaaatgatttaagatcaacatttagcggtagtgcatggcaatatgatgaaactacaggggagtattatttacatttatttagtaaaaaacagccagatttgaactgggaaaatgaagaggtgcgcaatagaatttataaaatgatgaacttttggattgataaaggtattggcggatttagaatggatgtaattgaacttataggaaagattccagataaaaaagttacgcataatggtccaaaactccatgaatatattagagaaatgaataagaagacattcggaggcaaagatttactaacagttggagagacttggggatgtactacagaaatagctaagaaatattcaaatccagatgatagtgaacttagcatgatatttcaatttgagcacattttattagatcaacaaccaggtaaagaaaaatgggatttaaagccgttagaattattagatttaaagaaggcattatctagatggcaagtagagctagaaggcacaggctggaatagtttattctggaataatcatgacgtaccaagaatagtttcaaggtgggggaatgacaaagaatatagggtagaaagtgcgaaaatgcttgctacattattacatggaatgaaggggactccatatatatatcaaggtgaagagcttggtatgacaaatgtaagatttgaatcattagaggattacaaggatatagaaactttgaacatgtataatgaaagaaaaaaacaaggttatactcatgaggagataatgctatctatatacacaaaaggcagagataatgcccgtactccaatacaatgggatgatagtcaaaatgcagggtttacaagtggacagccttggctaaaagtaaatcctaattacaaagaaataaatgctgaatctcaattaaaagatgaaaattctatattcaattattataaaaaactaataaaaataagaaaatcgaatccagtagttgtatacggaaaatatgaattgatgttggaagaaaacaaagaaatatttgcatatacaagaactttagaaaatgaaatgttattagttatatgtaactttacaggaaatgagacggagtttgtacttgaaagaaaatttgaatttaaatctaaagaacttttaatttcaaattataatgttaatgaaaatgatccgattgatagtatagaacttaagccatatgaatctagaatttataagtttatattatagaaatacttttatatagtggatatggtactatttttctttagtttgtcttgaacaatattatattgatgtaatagaaagcccattgatttcagtgggctttcatgctgtttaaaggtaaatttgcacagaaaattgagttgagatattaagatgaatatggaagtgtttgaaagagtataagtacaaaatatgcatttagtattccttactaatctaacttcagagtacactacgtctggtttaacctagtagaaattgttttatctttttttcagtatctgactcgggtaatgctgtgagaattgtcagctttaaattcctatccgataaaaccatatagctggtatactaaaagttctgtcagaggcaaaagagatgggagaatggttattgctgctagtacaagtcaagtataagttataatgtagaaacttaattgcaaaatatatatagttaaattgatgaattaagtgggatcagataaaataaggtatatgaagtgtttttgaagatatatatgaaaaagtttaggaggtatcattttggaaaaagaagaagttgaattattgccagcaggactcataacatgtttattagatgacaaagaagtacgtataataaaaatatctcctgaaaaattaacagtgcgtgtggctgaagaaatagaaaagataagcagtataaaagttgcatttcataagtttgatgaaaacagatatgaagaagttataatacaagattataatatagtggaaaaaagaaaagaagattttagtttaatatatattttcagcattgaatcacaaaaatactcacataatgtaagaagtgcttttaagaagtattcaaattatattatgttaaaagcttttggtgatggcaatgaattttcaaaggaaatggttaattatccggcaaagctagataaggagtttcataaggattatttagaacagaaagaagagtggttgttaggcgtaaattatggggattgggatgaagatattattgattcagtggaaatagctatttctttagataatgatatattatataaaaagtttatggataatgatatccaaacatttaagatagattacttaaatgaaaattttatagggagttatgaactatttaagaaagatattaacaggatttatattggaaatgaattttgtcataacttatttccagaaataaaatcgttaaaaggtatgatgcagaaagccaaagaagagagcctcgagataacgttatgttttacatatatgagagagtgttatatagaaaaaacaaaagatataatagaggcagtatataattggtgtaatgaaaataatactaagatagaaattgttgtaaatgattttggaatgctaaaattacttaaagataagatagatattttcaagccgtcactaggcgttttattaaataagagaaaaaaagatccaagatatatttacaagaaaggctacttagaaaataaagagcttatagcaacaaacagtcttaatagttcaatttttacaaagtttttgaaagaatgtaaaatagaacgatatgaatatgaaaattgtggttataaaatttctattgcagatgggcaccatagtatgcatattcctttctatcaaacaaatacatctcaatattgtccactatatgcaatgtgtacaactatggatagaggaaatcagaaacttgttactgactgcccaaagtattgtagcgattatgtattttcttatccaaagcatttaaaaatggttggaagatataattcgctattcacatttgatgatactttgcttaaaaatccaaaagaattagagtattacataaatagcggaatcgatagaattgttttaaattttctatagatattgaaatatgagcttatacttatgtagagtttaacggtgatatgtaactatttcacatacgcacatataggtttatctatgaaggaggaaaacataatgaagatagtagcaggaatgggatgtattgatgattatataaagttagtgaaggctggagcagatgaagtgttttgtggatatgttccttatgaatggaacaaaaaatatggaagtttatttcctttaaataggagagaagtactttattataacattcaaataagttcacttgaggacatgaaaatactaaagaaaatggttgatttttataaagtaccagtaaatataacttttaattatttatactatcttgaagaacaatatgaaatgatagctaacataataaaagatttgataaatattggctttaatgattttattgtagcagatattgcgcttatattatatttaaaggaaaggaatctaaagtgctcaatacatttaagtggagaatgcgctgagctaaaccggctttctatggaatttttcaataaactaaatatatcacgatacatatttcataggaaaaatacaatcgaagatatgaaatcatgtataagaagcaacgaagtagaaaatcttgaatatgaagcatttattttaaatgaaagatgccattatactggtgctttttgtagctccctacattgtgatgaaatgatacatttgtgtaaagttccatatgaactattaagaatagataaaaatgagagtagtttttgcgaagttgataagagagctgagttttattacaaagagatagatgacaaggataaggaaggattctatatagaaaatcaatctgatccagaaaatgaatatggaagtgaaagagaagatggaatggaagtttcatattttattggagaaactggatgtggattatgttcgttaaaaaagttaaagaaagctggcattactcatttaaaggtagtcggaagaggaaattctattgagaatatggaaaaggatataaaaagcctaaaaaaggccatagctatattagataatactgaaataagtgaaacctatgaagaatatataaaaaataagttacttgatggcaaatgcagcggacaatgttattattaaaaagtaggactcaccatataaaggtaagtccttttataagttatcacatagtattaatatatatatttaataaataattcttcatcataattctaaaagtattgcaagaattttatctgtaattgtgaattgagaaatgcgcattgtgaattgcaacatatatattaatgcaggattatttctcaggtgaataaaaggggaattctagtaaataaaatttaaatatgcaaaatagaactttatgctttttggctaatcttgtgtataataagcgcaaggatttgagttattataccaaaagtacataccccataccatccaaagtgagaatagctataggaacctaaaaacgatccaaacgccccaccaagaaaaaagctaaccatataaatagtattaagtctattacgtgtttcttcatttaaagaatgtactcttgcctgattagatacattacaagattgtactcctaaatctagaagaattactcctaaaactaatccccaaattttgaatcccaataggaaaaataataaataggaaactataaccacgactatacatatgactatagcaaatcttgaacctcttttatcagctacttttccaaccagtggagcagcaagagcaccgctaacacctactaacccaagtaagccagctgcttcagctcccatattgtaatgagaactttcaagtaaaaatataagggaagtccaaaaggcactgaaagctgaaaacattaatgcaccattaagagaggattctcttaagattggctctgtttttattaagtgtatcattgattttaataactcagaatatttaatgtcggaaacagggttgcataatggtatcaattttctaagaataagcatgagagcaagcatcataattgctgcgataagataaactattctccagccaaggtagcttcctaatatgccactaactgtacgagaaagcaatattccaattaataaaccgctcattattgtgccaatagtttgtcctctttgttgcggatttgagagctgtgcggccaaaggaataataagttgagggattatagaagtaaacccaacggcaaaagaagagattgtaagaatatatatatttgaagagaaaaacatgctcataagtgaaattactgagaataaaagcattattactattaggtttctcttttcttttatatctcctaaaggcaatataaatatcattccaattgcataacctatttgtgtgagcatagctgcaaaacctatacttaattggtcaacatgaaaagtttttgctatgtctcctaaaagcggttgaatgtaatatagatttgcgactgtaagtccacaagctattgacataactaagattagtaatttagttaatataggtctagtattggtattatctattgatgaatttgttgctaatgcagcattagttgattgatacatttataaatcacttccttaaaattatataatacatataattgagcaaaggtctaatttacaagtaataaaaatttcttataaatatcaatgctacaattatatgagggttagattcgataaaagtttatcgaataaaattagtaaaaatcttttcttctctttcaggagtttttataattccttgaccattttcgataagcttcataagccaggccatgttcttgcctaggattctcataatttgttgtccttcttcatcttgcattacttcacctggggctcttccgttaattacattccaatagtttgaagtaggaataatcatttcagaatgattaatataattgttcaattgatcgaaggttggaattccacctgcacgtcttactgcgactactgcaatgcctactttaagtcttaacatactatcagtagcttcggctacacgaaaagccctatctaaaaatgatttcattgttccggcaattgctgaatagtgtactggtgaccctaagattatgccatcagcatctttcattttttcaatccactcgttaactggatcagtagcaatggcacatttaccatttttattttttgtgcaatatccgcaagcaatacaacctcttatagacttgttcccaacatgaattatttctgtttctattccttcattttctagttcgtcagtaaccaattttattccataataagtattaccttctttatttggacttccgttaaatgctacaactttcatttatttttcctcctcataatacatataatttgatgatctttataagatctattacttatttgtttttaattgaatattaataaatataattcccgacatatatcttaaaaattcttaataatataataagatggttgataaaactgaacgtttagtttataaatacatattatactaaacgttcagtattgtaaatagtttttttaaaaataaaaattttatttttaagtctattaaaagggtacaagaggaataatatcactaacaattaagtcaaatgtttaaaagagataagttagaattgataagtataatatatatagtataatagacgtatagtttactaagtataggctataagttaattacaatggaggtaactacatatggagaaaaagttaggacgtcctcgtagcgagaaaactaaaaatgcaattctttccgctgcctatgatttattgcttgaaagtggttttggatctgttacaattgaaaagattgctgaaaaagctggagttagtaaagctactatttataaatggtggtccaataaggcagctgttgttatggatgctttttttgacgcagctgttgtgagactcccagttccggatacaggatcaactatggatgatataataattcaagtaaataacttagcaaattttctaactagtcgtgaggggaaggtaattaatgagataatagcagaaggacaatctgatcaaaaattagctgaaacataccgaacagtatactttaagcctcgtagacttgattcaagatatattctagaacgtggtatttcaaggggagaactaaaagaggatttagatatagaattagttatggatttagtttttggtccattattttatagattattaataacaggtgatatagtagatgagaattttataaggaatatggtcacttgcgcttttaatggcataactaaaagttagtattgacggtaatttaattaagaaaattctaatgatgcaaaaattattgatactttagtcgcacatattatgttttttattaaaatcatagaaatataaaatatagattttattgaaagtttatattaatttacttagaataaatctaataaattaatatagaatatatagtgtaaagctaatgcatagcttgtggtgagttcatctatttgatataatcataagagtaaaaaataacatatagtcagttcgaaagcctcctgacttaaaataaaactacggttaaataattgataatagtaaagattaaattaatttgtgttaatggaatcttttatttttgttgagtatatttatcgtaggatttttcctgcgatttttttattttctaggaatatatattgaagcaaaatttgtggagattttgttctttgagggtacggaaattatgggaaaggttgattaagcaggttacctttaaaaatattattagtaaaatggaggattttatatgaataataataatacagtgaaaaggctagttaaaacagctatcatagccgcactttacgcagttataacgcttgttctggcaccaataagctatggtcctatacaatttagagtctcagagataatggtattgctggcattttttgatccgttttatattgtaggtcttactcttggatgttttatagcaaatattcttggacctaatggtttagcagatataatatttggtactttagcaacatttattagtgtttatgctgtctcaattacagaaaggtttgtaaagaataagaaaacatcattagtaatagcatcgctttggcctaccatttttaatggagtaataattggatggatgcttaactatatttatcaacttccacttgtattatcaattggagaagttgcaattggtgagtttgttgttgttacaatagttggtgtaccaattgttaggcttttacaaaataaatatagcagttttcctttattttgtaagaattaagaatgaatattttttacaaaatagtatatatcaaaagatattgcagtagagtttttattgcaatatctttttttacaaacagtaattttgaaaacggactactaaaacaaatagcatagatattagaaaaaagtgcattacaattgttaaaatagatctattattgaaagtaaaagcactttattaataacaaagagtcaataataaacataaatatagcatatgtagaatatttatgaatagtaatttaaatggatttatagattaatctttactgctatatatgaattattggagaaattataattaattttcaagtttgacatgaatatccccctactctataatttaattacacaatttttaaaaaacaaggaagcgaaaattactatgataagtgttatcgaaactgcaattataactataataatatcatttatatctggattactgttagagtattataaaaatctggctcctaaaatattatgcaatataggagagggtgtaccactagaattaaacaacaaaaaattatgtgcatatgttcttactgtgagaaacatatcaaataaaacaattcataagttaaccttaaatatacaagggttacaaaatgatttgaaaattggggacgctcaaataacgaaaggtttgaaatttgattcttcaatagaagataatattttagatgtatatatacctttcttaagtaaagatgatgaattttcagctacattatatgtggaaagtaaatatggagaatataaaaagcctgtggttacaattagatcacctgaaaattttaaagagatacaatcaattgagcaaggaggaataatatcctcattacttaacatgcctaaaaatataaaaaatttactttgtaatataacgaaggatgatgctttaacttctaatagagggcgcagatctacagtaaataaggaacaaactgctaagaaaatatctggtaaagaaaatagtaagagatttggtagagataaaaactcatataacaatagaaaagccctaatagctattatatcaatcattttaattataagcattggagcattaggagcattatattttcaagagatgtctactaatgcaaaaacttcagatgaaaaaactgaagttcagaaggaatcaacgagtgaatcgcagtcagaaggtgaacagactaaaaatgcaaatgaaaaaacgccgacaagtggaaaaaataaaaattctccagtaaaagtttcaggtaatgaagcaaataaagattcaggtgcaaagacaccacaaaatggagatactggaactccagatacaaagacacaagcaggtggagcatcgggaaattcagatataaaaacatcaacagatgcaaatagtcaaagtaatacagatacaaaagtatcaacaagtggtggaacaaatggaagcacaaacttaaagcctccatcaggcacatcaagtgaaaatacagatgcaaaagcatcaacaagtggagcaaatggtaatacagatcagaaaacatctacagatggaactactaaaaatgtggatacaaagtcatcggcaggtgggacaactgcaaattcaggaaattagtgtgaaatgtactttgtcagaagtaatataacagcaatcattaaaaaattaacctcttcactattatacatgaggatataatagtgaaggggattttttatattacatttttagagttttatattatggtaaagtaagatcatcttatttataaaagcgttatatataaggaaaatagtttaaagtaagaaataaatgtgaataattttatataaacagtatactaagaataaagaattaaactataatggttaatgttaagttaatattataaaaaattggagatattatatgaataaaatagataccttaaaaatttcaaactatgataagtttaagtgcacagctgataagtgtaaattcacatgttgtgaaggatgggatattagtgtagatgacaatacatatgataattgggaaaatgataaagctaataatattttaaacaatgtaaaagcaaaaagatgtgaaggtaaagataagtattttataaataagaaaacaaatgaagcatgtccacttttagacagccatggattatgcaatatagtaaaagatcatggggaaaattatttatctttaacatgccaaatgtttcccagaatagagaatgtttttgaggatagaaaagagctttcattatcatgttcatgtccagaagtattagagcttataagtagtgagacaggcaaaataaatatgacttcagaaagccataatagcttagaaagtaatgcgttagaagttaaagttagagaaaccatcataaacataatgcagcaagaaaaatttttactagaagataaacttattattagctttcaaatgctatcgactattttagaaaatgacgatcttggagaagatgccttattaaaggaattagaaaagtataagtataggaattatgtaaaagagcttattgacatgtataagggaataaagataaacacaaatgactccattgaagaagtcaataatctatttttagatattatagagaattataaagaagtttctatttttaatattcttttaaaagatattggtaatttcgcggaaaatgctaaaattaaaaaactttcatctaaatggaataattataaaagtttattcgagcaatatagcagctttattgaaaattgcattatatctaaaatttttagcaattgtattagtgatgatatagaagagatgattatttcatttcaaatgattatattagagtatttattgttaaggtattccttattcttaaaatattccatggtcaataaaatagatgaggaagacataaagaattacactgtagctttttcaagaataataggtaataatactgatgctatgatagaattcattagggatggctttggagatgatattttagagataggatatttgtgttttataactttagtttaatatatgccaaaattttagaattaggtggcattatgttttattttaaatataaaactgtagaatattgcaagatatatttagtataatggagtgtatgaggtgatgtttttgaagttaaacatttttttttgcttgatactattattatctgcgttaacattaatttatataggatatttttcatggaaaaaagataaattatatgtttcaatgtctttgattcctgtatcaatttatgcactaggatatggatttgaaatattatgtacaagcatcgaaggagtgaaattctggattaaaatagaatacttaggtattccatttatagctgtatgttggttaatgcttgcacttaactttacagggtataaagagaggtttaaaaggaatactctatcattactatatataataccttcaattacatttattctgaattgtacgaatgattttcatcatctattctataaagaactatatatgaatgatactggagtttttccaatagtaggcataatagaagggccatggtattggatacatattgcttatacatacattctaatgattgcagggttaatattttttgtatcagcatatttaaaatcagcatcaattattagaacacaaattttgcttataatagttgcatgggtaattccgtggggatcggatatcatttatatatcgaagcttttaccatttactcttgatttatctccatttacgcttgctttttcaggaataatttatagttttgccatattaagatttaaatttttagagcttacaccaatagcgttaaacaaagtattttccagtatgctagaaggtgttataatattggattctgaaaataatatagtaaattttaatgattcagccaaaaatattattctagagttaagagaaataggtcaaggagaacacaagattgatgaagtatttaggaaacacgaaacattattaaatgttataaagaatggtttcagtaatgaaagattgatgagcataagttatgaagaacagctaaaatattataagataaatattaataatatatctgaaaataatggtaagataattggtaaaatactaattctaactgatattactgagattgaagtgcaaagaaaaaaagtatatgataatgcaaaatttcttcaaacacttattgatgctattcctaatcccatatattctaaggatgaattcggagtatataatcattgtaatgtagcatttacagaatttttgggaatgagtaaagaagaattcttgggaagtaccgtttataatattttcgaaaaggaactagctgaagtttatagtaattctgataagaatataatgagcaaaaggcaatttcaagcttatgaagaacgacttacacataaagatggcacatatcatgatgtaatctttaataaatcagttgttgtgaatgaagatgataatgttaaaggattagttggagttataatagacaccactgaacaaaagaagagcaaggaaaagataagtaagctattaaaattaaaagagtctatgctgaaaatagggtactcaattaacgagatatcaaatattaataatttactacaattaatattgaatgaagttattaattgcatagatagcagaagttgtggatcagtgctgcttttagataaagagaaaagtttaaaaatagctgtggctaaaggctataacttagcggatattaaaacatttgaattaaagtacgaagagcactttgcttgggctaatgagaaaaataacgtaaatgcaacaaccattttcaatgatattcataaaatagaaaatataaaaatgctagatacggcagagggaatgaaaataaaatctattatcagttcacctattatcatagatggtgaattatacggatttttgaatattgatagtatctacaataattgttttaatgaaggagatttagaattaatggaatacatgagaaatcaagtttctgttgcaattactaatcataaacttcatgagagaactttatatttatctagatatgataaattaactaatgtatgtaacagaacgtggtttgaacaattaattcacagtgaaatttataatgaagataggaatatagaagaattttttcttgtagtttttgacttaaatgatttaaaacttgttaatgacaactatggtcacttggctggggacgaattaattaaggaattttcaaaaggcttaaatgctttggctggagagggcgatattataggaagatttggtggagatgaatttgtaggaatttttatgaattcagatttagaaagtttaactaataagctggaagaactgattagaaagtttaaagactgtccactagtatttgaaggaaacaaaattgtttgtagttatagctatggtattgctaacttcccaagagaaggaatggaatttaatgaattaataaagagcgctgatagacgtatgtatgagtataagcgcaaactaaaaagtaaaagagcattattgataggcgtataataaaaatgatcaatgatttttaaatgtgaatcattggtcatttttaatttttcatatgtggactaatatgggaatgagtgatagcgctcataaaaatctaaataataattagattttatatcgatcatttaagttgtaaattagatataaaaagtagaacaatacaaataattgggaatttgctgtataatttatatatactagtaaaaaagcaaggaggttaaaatgaaaaaatacaggcagattataagaagaagaatatttttatcaatgatatctaacccaatatttgtatttatatattgtatttcgctttatgagttatatacgctttctaggtttggaagatttcataataacactattatattgcttggatgtataacattacttttagcgtggcttatatatgtaataataagaagtataagaaaccctataagtgtgccacaacagattatagaaaaatataaatttaatgaaagtaatataaaagttttacaagaagacgaactagaggtagattttcaagatataaagtcattcagaataaatagaaaatatgctgttataacacttagaaacagagacttattagttttaagtatgatagatagaacagatgaagaaataggcataataaagaagagcttgaatgatggaaagatttttaaatcaaattataaaactatatggatctatatagctatgatagttatagctgctgtaacattattttacggagcaaaaatatataatgatacaataagctataatggaaaactttcatggttcttaagtgatttgaaaaacaaaaagaaagtgaagtttgaacataacaatatatatgaaaatggaatacaaggtattttcacagacattaataaagaaattcatatgccagataaattgtatgtttcaagtaactttaatctcaattttaattcagatggaacaattacgttgtttgatacatatctttatggaaaagataataagggtaagttagaaagttatttaataagttataatagcgacaaatcagataaaataacaatatatttaaatgggcatgtaaatgctgattataatgaagataaattgttagagccattgctaagtacaatgaaatctatcccacttaaggatatagtgagtaaatggaatgaaaataaatatgggattctttattacggtaatcgaagttttggatataatactgatggaattacttatattaatccggaagggggcacaaaagcagcttcaaacgcttcttcagagataataggttatgctgtttcagtattcgtacctggtaaagaaaaaatatatactccagctagatatattctaacagaagatttaaataacattaaggcgcatacgcctttaaaagaagacaaagataaaagtagttctcaaaaatcaaataatcaggatgaattttatatgtctgatcaagttggttataggctagaagtgactggagctgcagctggaagcagatcgtactctttgaagagcacaattaatgggggaagtacatggaaaattgtaaatgaagatccttttgcagggaaaacaggagtggcaactggaataagttttttgaatgataaacttggttttttatgtttgtctcatagtggtggcagtaatggagaattgtatcgtaccgaggatggcggtgtatcttataaaaaagtaagttttccagagagaaaagtaacactagataatggggaaaaatataatccttttgatttgccagatatgccttatgagcaagatggaatccttaatgttttaataggtcaaggatctgatggagattataatggaggatgcaaggctttgtatgaatcaaaagatgaagggttaacatgggaatatgtaaaagaagttgatagtaaatgatttttggtttttatttccaatatggtaatccaaattttagcatagtgagtttggtaaaaataaatataaaaatccctataattaatgacaactagaaatctagataatttggttttaagatataaaataggaatgtgatggattaatatgtatataaattattcattacattcctattttatatatatttctatgatgagttatggctttagtttcaataataaccgagctatttattattttcattatgaaagacctaagacaacaggagtagatttatatcctatcccaattctatcaattcccatatcaatcaattttagaaagtgctctcttgtctttatggcacctgaggccttgattttacagcgatccttcgcagtatccattattatttttatggtttcaggggtagcacctttgctagcaaatcctgttaggaaattagttgatgttttaataaaatcaacaccagctgaaatagcgacttctgtagatttttttatttgatctaatgttagagcatcagtttcaaaaattgcatttacaagaatatcataatcatgacacacatcaacgacagcttttatatcggcttcaactgagtgccacaaattacttcgtatccagccgcaatttgcaactatatcaagttcatcaattccttgcttacagcattcttctgcttgtaagatttttgaagatgttgctgatgtaccaaaaggaaaatcacatacaacacatatcccagtttgagtttcagctgttaactctttagcaatatttattgaggatggatagacacaaactgttttgcatttataatctacacctttttgaatatactttctaatttgatctaaagtaaattctggctttagcactgattgatcaatgtaagatcctaattcctctatagtcatttcggcagctttttttgttggtatcataattttcgataacacctatttagtatttaatattctaatgtagtaattatgcagtattgaatattatttaggtattcctccttttgaatatattataatgtagttttactacaatgtcaattgatacaatgtagtaaaactatttacaatataaaagaattatcttagaatagtattaaagaaatattgaatttgtagttttactacattagtgtaatatatatttaaggaaaactgcaaaacaaaggatgtggatgaattgaaccatactgagtcttacgaatataaaataaaaaatatgtataatctactgagatcgtctgaaaaaaaagtagccgattatgtattattaaacgggcattctgtttctacaatgactttagctgagctttctcgtcaagtaggggttagtgaaccaacaattatacgttttgtgaaaagtataggttgtagtggatatagtgaatttaagatggcattaatgaaagagtggggaagggaatctgtagataagcagtatgattccaaattactagtagaacttcacattgatagagatgaaaaaatagaagatgtgccagtaaaaatgattggacttactataaaggctttggaagatactttaaaaataattgatattgataaatataaaaaggcaatagaaatgattagaagctcaaatatcattgatgtttacggtgtggggaattcgggaagtgttgctagtgatattagaaataaatttttacgcataggattagagtgcagagcatactctgatagcaatatacagcaaatctgtgcaagtcatctaacaagtaatgaccttgccattggtgtatcccattcagggagcacaatagatactgtaaatgctttaaaaatagcaaaagaatctggagcaagaactattgcattaacaaattttaaagcaccagctatttctgaatatgcagacataacattttttactgggggtgaagaaactacattttatagtgagacaatggtttctcgcatatcgcagttagctattgtggatatgctttatatgggaattttgctagatgattatgatttatatactaaacgccttgaaaaaattaatcttttacttaaagaaaagaattatccgaagaaatagaaaatataaatttgcatagctaggttagtaaaataatgcatataacaaagaaaaagcttctttgttatatgcattattttctattatatgattatattttagcaaagattttgattaatcaccaatttagctaggagattcaaaatatgcacaatattaatatttacaactaatatctaataggtattatagtacttcgagtatttcaactgaatatttttcacctggagcattgacttcaacaatatcaccagctttatttccggctaatgctttacctaagtctgattcaatacttataatcatattttctggatccagatccatagttgttactagtgttacaacaacttcatcatcatcttcgacaaacctaattctagctttgctattaattcctagtactgatttatctatactattatcatctattaccgttgcagttgaaatcatagttaatagatattggattctattatcattttctctatagtttctgcaagcctctttatattcagcattttctgatctatctccgtgagcagcagctactaatttttctttcgctatttcagctcttttaactgtcatcctataatctaattcttctcttaactttttaatattttcttcagttagaatattattcataagaaagctgacctcctaaaatatattatgagaatattatataatatatatgaagaaaagttaaatcactaataccttttatttttttattaaaatgcccgagataatattttatgaaaacattgacatgcagttatagatatgctagagtgaaaaatgtgatatagtatgtgactggtaggtaggcattaactatacataaatatttattgaagatgtttatgttggttaatgtttttttgcacacaaaagagataataaggcattcataatgtgcaaaaataatcctatgaaggagaagaattatgaaagacaaagtttttggcgttttgcaacgtgtaggaagatcttttatgcttccaattgctattttaccagtagcaggtttatttttaggtataggtgattcattcactaataaaacaatgcttgatacgtatggatttacaggtttaattggacctggcacatttgtcaatgaacttctttcagtaatgaatgatgcaggaaacattgtgtttgaaaatttgcctttaatatttgcaataggggttgcaataggcatggctaagaaagaaagagaagttgcagcgttagcagcaggaattgcatttcttataatgcacgcatcaattggcgccatgattaaaattcatggtggaacagaagctcttttaagtggcgcatcaactgaagtacttggtataatttcattacaaatgggtgttttcggtggtattatcgtaggacttggaacagcagcattgcataataggtattataaaattgaattaccacaagtattatcgttttttggtggaactagatttgttcctattataagttcaattgtctatttagcagttggaattttgatgttttatatttggcctccagttcaaggtgctatttacaaagttggaaatatagtgcttgcatcaagttatgcaggaacgtgggtttatggtttgatggaacggctactaataccttttgggcttcatcacgtattttatttaccattctggcaaacagccgttggaggtacagctgaagtaggagacaaagttattgaaggtgctcaaaatattttttttgcagaactagggacaccaggaataacgcatttcagtgtttctgcaacaagatttatgtcgggtaaatttccgcttatgatatttgggttgccaggagcagcgctagccatgtataaatgtgctaagccagaaaagagaaaagcagtaggtgggttattactatcagcagcattaacttcaatgcttactggtataacagaaccaattgaattcacatttctatttgtagcaccagtattatatggaattcactgtgtacttgctggacttgcgtatatgttaatgcacatgttaggtgttggagtaggtatgaccttctcaggtggatttattgatttattcttatttggcattttacaaggaaatgctaaaacaagctggatgttgattgttattgtaggaatcgtatattttgtagtatactatttattattcactttcttaattaggaagcttgatttaaagactccaggtcgtgaagattctggtgaagttaaactttatactagaagtgatttagaagcaaagaaaaatgatcaaaatgaaaacgcagacgaactttcagccatgatatgcagaggtctcggaggaaagaacaatatttctgatgttgattgctgtgtaactagactgcgttgtactgtacataactctgaattggtgaatgaaggtttgttaaaacaaactggagcatcggggatatttcacaaaggcgtaggcgtccaaataatgtatgggccaagagtaactgttataaaatcaaatttagaagattacttaattacagcaccagataaagaagatactggttatgtaataataaaaaaggaatcagagaaagatactgaaaaaggtattgaaaaaaaggttcaaggaaaagttataagtacagtaattttaaatagtccattaacaggtgaagcaaaagatttatccgaagtaccagatgaagtatttgcaagtaggataatgggcgatggagctgtggttgttccaagtgatggaaatgttatagctccagcagatggagtaataagttttgtattcccatcaaaacatgcattgggattaacaacaactgatggacttgaattacttattcatataggaatagatacagtaaagcttgataaaaaagcctttgaaacttatgtggaagagggagataaagtacaagctggagataaaatattaagctttgacttagaatttataaaaaataatgcaccatctattgcatcaccatgcatatgcactgcattgaatagcaatcaaaaggtgcgtctattaaaaactggagatataaaagctggagaagctttaattgcagttgatgcatttgaataatatataagggatgaggaggcataaaatgtttagagtgataaaagcactaaatcataatggtgtactcgctataaatatggataactataaagagtatatcttgctcggaaaaggtataggttttggtaaaaaagtcaatgaacgtattgaagctccagaaaatgcacatatatatctcttgcagcaagaaactgaaagaggattgactaaagagataataaataatatagagcctcagattttagaaattgcgaataatattattctggaagcagagaagaaatttcacgaagtagacgagaacattttatgcccacttgcagatcatattgcatttgcagtaacaagaataaaaaataatgaacaaattagcaatccattaacacaagatattaaagctttatttccagaggaatatgaggtggcatgtaaaggcaaagatattattaaagagatagaaggcgttgaaataaatgaagatgagattggctatatagcacttcatattcattcaagcttaggaaatgaaaaagtatcacaagcaatggaaatagcaattttagttaggtcatgtattacgtccattgaagagagtacaggaaagaagatagatatcgaatccttatcgtataaccgtcttatgaaccacattaaatatatggcggcaaggatgttaaaaggggaaacgataaagcttgatatgaatgattatattagtgaaagatttccaaaatcatttgaaattgctgaagacatatgtatgaaactaggcaaggaattaaagaaagaaataaaagcagttgagataggataccttgcaatgcacattgaaagagtattctcagatgagttagatgattagaatatatataatataatataattttaatggaattataagaatttaaggttgcgttttattgaaactagagctccacgataatttatcgcggggcttattttattctttaggaatttatattctagcgcctgcgatttttttattttggggaaaattataatgaaatctgagaaaaattttttaaggtattagaaatacatagtctacgaagcagattttacatttctataaaaatcaaaataaaaaattatggatatttatgtcttagaatgagaattttaaagggagacaaagatgttacaaattgtaatagatacaagaataagatataataaagccaatatatcgttgcaaataaattaatgttaagttaagttttaataaaataatttggaggcaggggaatggataaaaaagatttttctaatttagaaaatcaaattagagatacaataaaaaatgcattcgatgtcatagattttgctaagataaaaaaggatattgatgataaagctcaagaaactgtgagagagacaagaaataaatttgtagataaatcacagtattttgataaaaggataaaagatgaattaaaaaatagatataaaaatattgcgaatgttgttccaaaatctgaaaataaaatacagagatatattgctaagagaccagttggaagtatatcaggaacattgtatacaatatttggatctatattaagcggaatattaggaatattaataatttcatactcaatacttatttcttttaaaagtgaatttttaatgagtaatttgattagcttaggaatattgttttctttttttgcggcgagtgtagcttttactttaagaggtataaatttaagaaagagagtgaagcgttttaaagaatatgtaaaattgctacgcggtaatagctattgttctgttagtgaattagctgaagttgtcaggaagaaaaataaatttgtagttaaagatctaagaaaaatgattgaattaaatatgtttccgcagggacatattgatgatgagcaaacttatttcatgttaaataatgaagtttatgagaattatttatcttcacaggaatctttgaagaaaaggaatgaatatgaattaaaaaaacaagaggaactaaaaaaagacttcaatgatccagtgaagatgcaactaagaaatacaattgaaatgggaagggattatattaaacaaataggaaacataagtagttctatagataaagaagaaatttctaaaaaattaaataggctccagaatataataaatcaaatacttaagtatgttgagcagaatcctaaaaagcttcaagaagttgatagatttgcaaagcactatctgcctatgactttaaaacttcttaatgcatataaggaattgaatgatcagccagttcatggtgaaaatataagaaatgcaaaaaatgaaattgagaatactttagataccataaataatgcatttgaaaatttattagatgacttatttgaagaaatagcattagatatttctacagatatttctgttcttgaaacactatttactcaagaaggacttaaaaaagatgattttaaaaaatagtatttaaacaagaaggaggaattaaaagtgaatgatggatttaaggaaaatatagatatgatgccaagcttaacatttgagccttttgaggaggaagttcctgttgctaaggtagaagaaagtaagcaaaaagaaatttttgatgaaagctatctaacagaagaagaaaagaagatggtcaatgaatttgtagataaaatagatgtaaataatacaaattcaattcttcaatatggagtaggagctcaaaagaagattgcagatttttccgagacagccttaaataatgttaaaacaaaagatttaggcgaagtaggagagatgctaacaagtgtagtatgtgagcttaaaaattttgaatctgttgaagaaaaaaaaggatttttaggcctttttaagaaatcagcagagaagattacgcaaatgaaagcaaagtatgaaaaggttgaaggtaatataaataaaatttgtagtgctctagaaaatcatcaaatacagcttttgaaagatattgctatgcttgacaaaatgtatgaaataaataaagtatattttaaagaactttccatgtatatcttagcagggaagaagaaactttcaaaattagaaaaggaagagctgcctaagttagcagaaagagcaaggataagtggacttccagaagatgctcaggcgacaaatgattttgtagctctttgcaatcgctttgacaaaaagatacatgatttagaattaactagaatgatttcactccaaatggcacctcaaattcgtcttgttcaaaataatgattcattaatgtcagaaaaaatacaatctacacttgtgaatactattccgctatggaagagtcaaattgtattagctcttggagtagctcattcaaacaatgcggctaaggttcaaaatgaagttacgaatatgaccaatgagctgttacgtaagaatgcagaaacactaaagatgtcaacaattgagacagccaaagaatctgagcgtggaattgttgatattgagactctaaagaatacaaatgaatcattgatatcaactcttgatgaagttttacgaatacaaagtgaaggaagagaaaaacgtaaagctgctgaagctgaattacaagaaattgaaggtaaattgaaagataggcttctgcaaatgagacaaagataaaaaaataataatgttttccgttttaattattttaaggtaaaacttttttgtatctttcacagtgagtattaattttagtttttttaattacaaattatcatatataaatgatataattaaagaagttatatatggtaacgataatagatgtaagtatttaataaaagtataggcataaatagaataatatgtttatttaacatatacataagctataattatgaatacgatataaaacataggatcaatgctgtgataactataaaaaagtgaaaggatatattttgcaagataatgctacaattacaagatcttaagtaagggggagagatattatgaacaataacatattactagaatcgggtactggggaattagaaataatagaatttattgcaaatggaaatcattatgcaattaatgttgtaaaagttaaagaggtaatagaaatgccttcaaacttaactaaattgccagatcctaagccagagatagctggcctcatactatgcagagatgaaatacttactttgattgatttaaaatacatattaacaaaaagatcggcaggaaatcttggctctaaagttatagtttgtgagtttaataaaataaaagtttcgtttaatattgatgatatagttggagttcatcgtataagatgggatgaaataagaaaacctgatgatttatcagaaaactcattagctgtcggaaatatacttttaaatggaaaagtattaattatgcttgattttgaaaaaatagttacagatatttgtccaagtgttggaataagtgaagagagacttatacaagtagattataaggatagatcatctataaaattagttatggctgatgattctgctttaattagaaggttattaaaagatactcttacaaaagcaggatttaagaatttaagaatttttgatgatggtaaacaagcattggatttctttgaagaattagcaagaaataaaggtgaaaactttattaaagaagctcaattacttattacagatatagaaatgcctcagatggatgggctcacattgacaagaaaaataaaagaaaatgaaacattgaaaaagcttcctgttgtaatattctcatcactaattacaggagaattaagacataagggagaatcagtgggagcaaatgcacagctaagtaagccagaagtaagtgatcttgttgatacaatagacaaactattaggtgtttagaaaatgcatatttaaagtgtttatcattatgccaagcacaactagaataagtaaattttagatctgctaaaattaatctaataggatagttaaaggtatgggtgaaaaattcatgcctttttattttataggaatctatatgaattcaaacttgtagataaaatatggaaaagactgattaagaaggagaaattttataaagataataaaatagaaagtatagccacctgtgaaatttttctaacatgcgcttaaaaaggcatatgagtaggaaaatctttggccctatagtcaactgatattttattatttaacataaatatataattaattgaagagaaatattatatgacaattgattattatatggaaaatattgtataatatgtaatgtacaattgctaataacatgttatattattcaagagattttatattttacaacgagcttttaaagggggaataatgtgtataacagctttataatatttatataaaaatttcttgtatgtgcaaaaatttaatattgatagaatcttatataagggggtttttatggaagaaaaacaaaatagatctaataaaattactaaagagatgatagcctttttttattgtctgagcattgtattttttatttctattattaatagtataggtgcgtatgctgaaactaaaaatgaaaaacaaaagtcacctgaaacatatgcattaatattacaagaaagaggaggagttcaggaacaaattaatggatctgacattggtttgaaaactgattcaggtatcacatttgataataaattgttacaggattctataaatagactaagttgttctgatgatagtaaagtggttcaatctggaaatgctactttagtcttagtaaataataattatgtaatatcaaaagaagtttatggaaacaaagtaaacaaagatatattatacaaaagcatagtaaaagcgattcaaaatggagatacaacattgaatttagaagctgctaactgttacgaaagttcagagcctagatttaaaataaactccccagtagttgttagcgctagggatacacttaataggtatctagcctctaaaattacctataattttggaggattaacacaatatttagatagttcaataataaagaattggattggcgttgatagtaattttaatgtgacaattgatgaaaatatggttagaaactatgttgataatatagcaaatacttatgcatcatcacttggtacaagcataaaggttagcggtggagacaatggtaataaccatagttggatgattaatgcttctgaggaaacaaaagctctgatagataatataaagagtggacaaactataagtaaatatccaatatatactcaaacctctacatccagttattttagtaatgttggtgatacttttgttgaagttgataaaggtaaacaacatttatggttctataaagatggatatcttgttgtagaaggtgacctagttacaggtaatgaaagtactgggcatggaacaccaacaggcgtgttttacctaaattcgaagcaaagagattcagtattaagaggtgaagattatgcagcaccagttagcttttggttgccttttattaagaatgatattggccttcatgatgctagttggagagatgaatttggaggggaaatatataagacggatggttcacatggatgtgtaaacctaccatattatgtagctaaggcaatatttgataatattagcccaggctgccctgttattgttcatgagtaatattagagatatttctaatcaacacacgagagtaaaaagctctatttaattataattaatgcaaaggaaagttttgatctttttaggtcagaactttcctttttttattctttaggaatttatattccaataaaatctgtggataacttaaaaaaggttgattgactagttttggtattttaaaaagaataaaaaagaaatcttattcgcctgccaaatttttctcacatgcgtttgaaaaggcagatgcgtgaaaaaatctcaggctccacagtcgcctgcgattttgttctaaataataataaacatttcataattaagaaattgaatttaaaatgttctaaatataattataattacataattattaaaatataaaacttcaataaaagttacttaatatatttttgtacaagctataattttaggatttaaaaataaaaattgtaaggttgaatggtgtcaggtgggataagtatgataaaacaaatattacaatatataaaatatccaaaaagaataatgatgattatttgtgccctggtagctatatattcaatagtttctatacattttatcaatcatttttattttggttcaacaattaatagagttgacgtttcaggtaaaacagcgcaagaggcagaagaagaaatattatctaaaatgggcacatattcagtggaattagaagaacgttatggtgcaaaggaagaaataaaaggagcggatattaacttaagatatgatttaggagacaaaattaaagaactgaaaagtaagcagattccatttgcttggattttatcttttttaggagagaagaattatacaattacggattctgtatcatataacgaagatttattaaagaaaagctttaataatctttcgtgtataacaggaagcagtgtagtggcacctaaaaatcctgaattagaatataaagatgatggatatataattaacaaagagatatatggaaataagattaataaagatgctttgtatgaacacttaataaaggcaattgtcaatggggagaagaaaattaatttagaatcaattaattgctatgagaatcctaagtatatatcaacatctaaggaagttttagacgctaaaaatatactcgataaatatgcatcatcaaaaattacatattccttcggcgaagataatgaagttattgatggatcaataatacacaattggcttaaagtagatcaagattattctgttgcaattgatgaaaaaaaagtctatgagtatatgaaaaaaattgctaatacgtataatacttcaggaaaaacaagagatttcaaaacatctttaggaacaataacaaaagttagtggaggaaattacggatggataattgatacttcacaggaagcaaaagagttgattaaagatattgagaaaggagaaaatatagcaaaagagcctatatataagcaagttgctttatctcatgatagtaatgacataggcaatacttatgtggaaattaatatgaatattcaacacttatggtattacaaaaatggaatacttgtaatagaaggtgatgttgttacaggtaatgcaagtagaggctctccgactccaactggagtttatcaattaaattataagcaaaaggatgctaccttgaaaggtgaaaattatagtagtcctgtttctttctggatgcctttttatgggaatgttggtatacatgatgcaagttggagatcagagtttggtggaaacatatataaagcgaatggctcccatggatgtgttaatgcaccatattacctagcaaaggttctatttaataatattgaagaaggcactccgatagtttgctattagtggtggttctaaatggttaaatttatataaaagatgaatcgcaactatcctatttaagctaattttttcctaagtggatacaacggaaaacatttacaaaggaaatttattgttatataataaattcataccgatcaataaaaaggaaaaattaatatctaaggttggcctataatagaattttatttggacatggccaagattatttaataacaaaaaagagtttaattgattaaataattaaattaagaaaatttgcaaatactttaactaagtaatagcactagaataaatacattgtttaggaggaattaattatgataaaaattagattattttgtgcagcaggaatgtcaacaagtcttttagttaataaaatgaatgatgcagccaagactaaagggatagaagtagatattgaagcttttccagaaagtcaaatggataaaaatctagatggcgtaaatgttgcgttgttaggaccacaagttggatatacattaggaaaggcaaagaaaatttgtgagccattaggaattccagtagatgtaataccaatggttgattatggaatgatgaatggtcaaaaagtattggattttgcattgaagttaatagagaagaaataaatgaaaaataggcctaaaaatttatagaagattttataaattctattaaataagctttcaagttgtttttgaaagcttattttttattttgtggtaaattatatcattagaaaatccgtagatattattcattgtgtaagtataaaatatgaaaatagttaatttagaaagctaggttttaatagagaatgaaaaataaaaaacacattgtatccgtacaatttactttttttattatatatgatattttaattaatattaaaatacaaaagaaaggaaggtgatgcattctatgaatgagaaatttgtttatgctccgggtccaacaagtgttagagaaaatgtaaggatagaaagagctaggataactactaatccagatgtagacgaagaatttgtggaattctataaaaatacttgtgataaaatagggaaaataattgagacaaaaaatcctgtatatatactaagtggggaaggtattttaggattagaagcggcatgtgcatctcttactgaaccaggtgatagagtacttgtcttagacaatgggatttatgggagaggttttaaggactttgttgaaatgtacggaggagaaggggtatatttttcgtgcgattataacaaagctatagatgaaagtaaattaaatgaatttttaagtgtggatcatgattttaagtatgcaacaatagttcattgcgatacgccaacaggagttttaaatgatttatctaagatatgcccattattaaatgagtatggaattttaactgttgttgattctgtttctgcaatgggtggagaagaaataagggttgatgattggaagattgatatagcattaggtggatctcagaaagcattttcagctccagcgggattaactatggtaagcatcagcgaaaaagctaaagaagcaatgaaaaatagaaagactccagtaatagggttttactgtaatcttaatatctgggaaaattattacgcaaataagtggtttccgtacacaatgccaataagtgatatcatggggttagataaagcggttgataatattttggatgaaggaattcaaaatgtgctcaagagacatgaaaaaatagcatatgcgactaggaaggctgttagtgaatttggacttgaattatttttagaagatggttattcaaacacagtaacagcagtcaaaataccggaaaacataggagctcagaggcttaaaaatcatatgttgagtaaatacaatactttaattataacatcactaaatccatacgaagatataattttaagaataggacacatgggggagaatgcaaaagttgataagattctttatgcattaaatataattgagaacggactaagagatctaggatttgaaaataatggtgaattggtaaattcatttattagacacttgaatagttaaataattgattattaaattaagcaaaggtggggcaaagaatggaaataaacagaagaaaaagtaaatttaaaacaaaagatatggtagaaacagcactattaacagcactagtatttgttgcaacagcatttataaatattagattgccgatattagctactggcggattagttcatttaggaactgtaatgttatttgttacagcaattgtttttggaaaagagaagggtgctatagctgctgctgtaggaatggcaatattcgatttatcatcaggatgggcactttgggctccatttacgttcgtagtaagaggaattatgggatacatggttggtgccatatcgtggagtaaaaatgaagaaggtaatagtattgtacttaatcttttagcaattatcttatcaggtatttggatgatagcaggatactacattactgaaggaatactttatggaaactgggcagcaccagttgcatcaatacctggaaatgtgactcaaattattattggattattactaggattacctattgctaaggtacttagaagatataaaaagtatatttaaacatattagaatgatgctttgaagtgatttacactattttaaagcatcattttttgcatttagtaaagcctataataaatgatataccgtggtgaaattttatttcgtaaataatgatattgacgaaataaatatatcatattatgattatattaacttgatactgtatttaggaggatattgagaatgagtgataacgatttaaagaaaaatagtgctaaggaagccatgaagtatataaaagatggaatgatagtaggtctaggcggagggaggagcatagcttatttaatagaatttataaaacaggataaaaatattaacgtaaagatagttactccgtcagtgaaaacaaagatgctttgtatagaaaaaggtttagaagttttgcacacaagttctgtggataaagtggacgttgcttttgatggctgtgatcaagttgatgaaaaattaaatgcattgaaaagtggtggaggaattcatactaaggaaaagttaattgctagtatggcggaagaatatattctccttgttgatgaagcaaaagttgaaaaagagttaacatttaatgttccagtagtacttgaagttttagaggattctttgaagtatgttgaaaaaaaagtactagaattagatgggaaaccagtgattagaagtagcgacataaaagatggattcactataagtgataatggcaacctattagtagatgtattctttaataatgtaaaagatattcataaactaaatgataatctaataaaaatctgtggagttatagaaacatcgctatttactaatgtaattacaaaagtaattattgccagtgaagaaggtattagagaaatttcacaaaaataatttaattaagaataaaatttaaaattaaaacgtatgaggtgaaggatatgaataaaataaattgggcaatactagggccgggaacaattgcagcagattttgcaaaggctataaatgaagtgaatgggaagatatatgcggtaggttcaagaaatattgaaaaggcaagggattttgctaataaaaataacatagaaaaagcttatggagattatgatgagatgctaaaagatgataatatagatgtcgtttatatagcgacgcctcactgtaatcattacgaatatataattaagagtcttaataataataaaaacgtattttgtgaaaaagcaattactgtaaatggaaagcaattgaaagaaatagttgatttagcaaatgagaaaaaattaatagtggcagaagcaatgactatttatcatatgccgttatataaaaagttacgtaaaattgttgatgatggcaagcttggaaagattaaaatgattcaagttaactttggaagccttaaagagtatgatgtgacaaatagattctttagcccagatttagcaggaggtgcgcttcttgatataggaacatatgcattgtcattcacaaggtactttctctctagtcagccagaggaaattttaactacagttaagaaattcgaaactggagtagatgagcagtcaggtataattcttaaaaattctgatgatgaaatggcagttatatcattaactatgagagcaaaacagccaaagagaggaattgtatgtggagaattaggatatataactgttgaaaattttccaagagcagataaagcaacaattacatatcctgatggaagtgtagaaattattgaagaaggccatggttcaaaagcattagaatatgaaattgaatgcgtaaatagtatggtaatgagtaaaacaggtaatgatactttaagattgtctgttgatgttatggatataatggatgaggtaagaaaacaatggaatttaagctatacttttgagtaacaagttttataaattaattacttggatacgatgattaagggagtaattattaaagtgagagagatagaaaagagtgttctagataaaattctttgtatttataaaagtttacatgaagcagaaaaaaagattgctgattatataattaataataaagaaaaagtcattgaaatgactgtttctgagttagcattagaaagtagtgttagtgaagctacaatagttaggttctgtaaaaaatgtgatttaaaaggtttttatgatttgaaaattaaaatagctaaagaaatggttaatttaaaaagtagtaatatatcaaatgaattagattccaataatataatgcaatcacttcaaaatatattagcaaataaaattgaagaattgaaacaaacaatttcaatgatgaatgaaggtaatataaaaagaatattagaagcaattaaaggagcgagaattgttcaatttgcagcggttggtaatacaatacctgtagcaatggatggagcatataagtttaatcagttgggaatatcatctgttactaataccatatgggaaacacaacttgcattttcatatactttaactaaagaagatgtagttatagtaatatctaattcaggagcttcaaaagagcttgtagctttacttgaaattgctaatgaaagacaggcaacaactatttctataactaatcatgagaattctcctgttgccaacaaaagcaaatatcatataaatacttcaacaagagaaaaattatttctagatgagtttagcttttctagagtatcggctatggttgttatagaaatcttatacttacttttaacaagggataaagaagatgcatataattggattagtcagcacgaacaatctattgcagaaggaaagatataaggagaaattacaatagggtgatataatagatattttatttaaaattttaaatagatattagatttgaagaaggaagggtataaagatgaagaatatagatattgggaatagtggaatcaaagcttctgaaattgggcttggatgcatgcgaatggcatcagttgaaaagaacgatgcggaaaagatcattaagacgtcgttggaagaaggaattaatttctttgatcatgctgatatatacgggggaggaaaatcagaagaagtttttgcagatgcaattaaaatgaactcttccataagagaaaaaatgatcattcagactaagtgttctatagtaccaggaataatgtatgatttttcaaaagaacatatcttaaattcagtagatgctagtttaaagagattaaaaacagattatgtagatacattactcctacaccgtccagatactcttatggaacctgaagaagttgcagaagctttttctaaattacacgaaaacgggaaagtaaaatattttggagtgagtaaccatactccaatgcaaatagaattacttaacaaatatttgaataacaaaataattataaatcaattgcaatttagtataatgcatacaggaatgatagatgcaggattaaatatgaatatcaaaaatgatgcttctatagatagagatgggggagtattagaatattgccgtcttaaagatataactattcaagcatggtctccttatcaatatggattctttgaaggcgtattcttagataatgataaattcccagaattaaataagaagattaatgcaatagcagaaaagtacgcagtaactaatactgcaattgcaactgcatggatattaaggcatccagcaaagatacaaacaatagttggatctatgaatgctgaacgaataaaagaaatatgcaaagcatcaaatatcacattgactagacaagaatggtatgaaatatatctagcagcaggaaacaaattaccataagttaaaattgatatctggcttggagtggaactaagttttactttaagccagttattttatgtgagaagattaagccattgggcaaataaattaatagtgagtctaagaaaatttataaagtgtaaaaagctaatatgattaagaaatatgaagaatctagatataatatattggataactatgccaggtgtatctctagtagtatattgtagtattatatatataaagagagaatttgaaatataaaagctgcaaattgtagatgattaagtatatgtagataaatattaatggtaagataaaacacgtcgctaagagcggtaaacaatttgaaagaaatattaaagaacttttaaataaaggaatttgagattttaaaaaaattgttgacaagttaaaaatcaagtgataaaataaaaaagtcgcttgagggtgacgaaaaataatataaaattataacgaaagttgtaagaaagaaaattggtctttgaaaattgaacagaataagataaatacatttaagtaaaccagcaatttttatttgagtaagctaagattaaactttttattgagagtttgatcctggctcaggacgaacgctggcggcgtgcttaacacatgcaagtcgagcgatgaagctccttcgggagtggattagcggcggacgggtgagtaacacgtgggtaacctgcctcatagaggggaatagcctttcgaaaggaagattaataccgcataagattgtagtgccgcatggcatagcaattaaaggagtaatccgctatgagatggacccgcgtcgcattagctagttggtgaggtaacggctcaccaaggcgacgatgcgtagccgacctgagagggtgatcggccacattgggactgagacacggcccagactcctacgggaggcagcagtggggaatattgcacaatgggggaaaccctgatgcagcaacgccgcgtgagtgatgacggtcttcggattgtaaagctctgtcttcagggacgataatgacggtacctgaggaggaagccacggctaactacgtgccagcagccgcggtaatacgtaggtggcaagcgttgtccggatttactgggcgtaaagggagcgtaggtggatatttaagtgggatgtgaaatactcgggcttaacctgggtgctgcattccaaactggatatctagagtgcaggagaggaaagtagaattcctagtgtagcggtgaaatgcgtagagattaggaagaataccagtggcgaaggcgactttctggactgtaactgacactgaggctcgaaagcgtggggagcaaacaggattagataccctggtagtccacgccgtaaacgatgaatactaggtgtaggggttgtcatgacctctgtgccgccgctaacgcattaagtattccgcctggggagtacggtcgcaagattaaaactcaaaggaattgacgggggcccgcacaagcagcggagcatgtggtttaattcgaagcaacgcgaagaaccttacctagacttgacatctcctgaattacccttaatcggggaagcccttcggggcaggaagacaggtggtgcatggttgtcgtcagctcgtgtcgtgagatgttgggttaagtcccgcaacgagcgcaacccttattgttagttgctaccatttagttgagcactctagcgagactgcccgggttaaccgggaggaaggtggggatgacgtcaaatcatcatgccccttatgtctagggctacacacgtgctacaatggctggtacagagagatgctaaaccgtgaggtggagccaaactttaaaaccagtctcagttcggattgtaggctgaaactcgcctacatgaagctggagttgctagtaatcgcgaatcagaatgtcgcggtgaatacgttcccgggccttgtacacaccgcccgtcacaccatgagagttggcaatacccaaagttcgtgagctaacgcgcaagcgaggcagcgacctaaggtagggtcagcgattggggtgaagtcgtaacaaggtagccgtaggagaacctgcggctggatcacctcctttctatggagaaatctagatcagacagacgctctgactagtacagatacattattatgtatcaaaatataaaatacttgctcaaaggttacttaagtatttgttctgttcaattttgaaagactaagtctttcgtaaatatgggggtttagctcagttgggagagcacctgccttgcacgcagggggtcaagggttcgaatcccttaatctccaccatgaagatttaattaaatataattaagtctttcaatgttctttgaaaattgcacatagatttaatgtatataaaatacaacaaagccaagaataaatattctttgtgatatgactaataattaggtcaagctacaaagggcgcatggtgaatgccttggcatcaggagccgatgaaggacgtgataagctgcgataagcttcgggtaggcgcacatagccagagatccgaagatttccgaatgaggaaactcacatgggaaaccccatgtatcataaagtgaatacatagctttatgaaggtatacccagggaactgaaacatctaagtacctggaggaagagaaagaaaaatcgattttcttagtagcggcgagcgaaaaggaaagagcccaaaccagagatttatctctggggttgcggacagaacataacgagaaatcagagttaattgaacacaactggaaagttggaccacagtgggtaatagtcccgtaagtgaaaactatgataatcagttctgcaccagagtaccacgagacacgtgaaaccttgtgggaagcagggaggaccacctcccaaggctaaatactacctgatgaccgatagtgaagcagtaccgtgagggaaaggtgaaaagaaccccgggaggggagtgaaatagaacctgaaaccatgtgcctacaaccgatcagagcaccttatgtgtgtgatgatgtgctttttgtagaacgagccaacgagttacggtatgtagcgaggttaagtacttaaggtacggagccgaagggaaaccgagtcttaatagggcgactagttgcatgctgtagacccgaaaccgggtgacctatccatggccaggttgaagcgagggtaaaacctcgtggaggaccgaaccacgttgctgttgaaaaagcatgggatgagctgtggatagcggagaaattccaatcgaactcggatatagctggttctcctcgaaatagctttagggctagcgtcggaaaatgtgagtagtggaggtagagcactgaataggctagggggcatagcgcttaccgaaccttatcaaactccgaatgccacatactatcagtccggcagtcagactatgaaagataagttccatggtcaaaagggaaacagcccagatcgtcagctaaggtcccaaagtgtaagttaagtggaaaaggatgtgggatttctaagacaactaggatgttggcttagaagcagccactcattaaaagagtgcgtaatagctcactagtcaagagatcctgcgccgaaaatgtccggggctcaaacttaccaccgaagctacgggttcacgttttacgtgagcggtagaggagcgtcgtaatcgggctgaagtcgtaccgtaaggagcggtggactgattacgagtgagaatgttggcattagtagcgagatgtaggcgagaatcctacaggccgaatatctaaggtttcctgagtaaagtttgtcttctcagggttagtcgggacctaaggcgaggccgaaaggcgtagtcgatggacaattggttgatattccaataccactataattgttattatcgatggtgtgacggagaaggataggatgtgctagctattggatgctagtctaagcgtttagggagttgggattggcaaatccgttccaacaattctgaggcgtgatggggaaggttctacggaaccgaagtatctgattccatgcttccaagaaaagcatctagagagagaagtagtgcccgtaccgcaaaccgacacaggtagatgaggagagaatcctaaggccgacggaagaattgcagttaaggaactaggcaaattgaccccgtaacttcgggagaaggggtgcctgagaaatcaggccgcagagaataggcacaagcaactgtttaacaaaaacacaggtctctgctaaagcgaaagctgatgtataggggctgacgcctgcccggtgctggaaggttaaggggaacacttagtggtaacgcgaaggtgtgaacttaagccccagtaaacggcggccgtaactataacggtcctaaggtagcgaaattccttgtcaggtaagttctgacccgcacgaatggcgtaatgacttgtgcactgtctcaactgcaaatccggcgaagttgtagtgcgagtgaagatgctcgctacccgcgattggacggaaagaccccgtagagctttactgtagcttagcattgaatttcggtattgtctgtacaggataggtgggagactgggaaactagggcgtcagccttggtggagtcgttgttgggataccaccctgatagtattgaagttctaactggatgccatgaaactggtgacaggacattgttaggtgggcagtttgactggggcggtcgcctcctaaaatgtaacggaggcgcccaaaggttccctcagaacggtcggaaatcgttcgaagagtgtaaaggcagaagggagcctgactgcgacacctacaagtggagcagggacgaaagtcgggcttagtgatccggtggtacctcgtgggagggccatcgctcaacggataaaagctacctcggggataacaggctgatctcccccaagagttcacatcgacggggaggtttggcacctcgatgtcggctcgtcgcatcctggggctgaagtaggtcccaagggttgggctgttcgcccattaaagcggcacgcgagctgggttcagaacgtcgtgagacagttcggtccctatccgtcgcgggcgtaggaaatttgagaggagctgtccttagtacgagaggaccgggatggactgacctatggtgtaccagttgtttcgccagaagcatagctgggtagctaagtcgggaagggataaacgctgaaagcatctaagtgtgaagcccacctcaagatgagatttcccatagcataagctagtaagaccccttgaagactacaaggttgataggtcagaggtgtaagtacggtaacgtatttagctgactgatactaataggtcgagggcttgaccaatataatcaagttgtaaatacattaaagaaactgtgtgcaattttgaaagaacaaaactttcaaaggaataattacagtaatagattgatgtaaatgtagtataagcgtaaactaagagtcttttttcaaaggaaactcgactcacattcgttcgctgagtgctaatttacacgaataaggaatacaaatcgcaaaagcgatttgcataagttcgttcgaccaaattatagatttgggaactcacttaatctcgtgatgatggcatagaggtaacactccttcccattccgaacaggaaagttaaggtctatagcgccgatggtactgcatgggagactgtgtggcagagtaggacgttgcgaggtaagcaaaaaaagatagttgtaataactatctttttttattttgcataaaaaatgtgattactaattttagtgaagaatataataataaatttaaatttaaaaatagtcttaggttctgatataagaagtgtcacttagaacttgatgaagaattaaatgtatataatttgaattaattgacaaatatttttagatatgataatgttaatttattgaaggatttattgtaagaatatagtaagtcttatgaaaggagaaatggtaatatgataaagagtgtaaaggtgattgctgtttaaactaaatatgggcggaaatacattcttatggtagttgtaccttttatttgtgttatattttcgcataatttagataacctttcataaatatgtgtactattaaggacgaatatcataacaggtttgcctgtttttataatgcccgcagatagaagccatttataggtttgtgtctgcgggatttttctgtccatttttagagattcagtaatatcaatagtatatgataagagcagcaatcaaaaaggagagatgtgcaatgaaggatttaaaattaaaatctatgaaaaatttaagaatttcaaaatcaagcaaaaaggagatttaaaaatgaaagaagtaaatcatataataactatgaagcaatatataggtgaaaaagaatataaagaaataaatgaacttcaagagatagtcattttgaatgataatgtaaatttaaaattagaattggactttaaattagaaatacaaaataattcagaaggatcaaagaaaaaaataaatgaatttttatattatgtagatgatgttttagttgcttaccttgggatttcatgttttggaggaaatatggctgagcttaatggaatgactcatccagaatggaggcggaaaggtatctttaaaaaactctttgatcttgcaatagatgaatgtagcaggaatggtttcaagaagatattattattaacagatggtaaatctaaatctggaaatgaatttataaaagcagtaggaggagaatacgatttttctgaatatgggatggaattaataattaagcatcttttagaaaattcatttcctattaatttaagaaaagcaaaggcatcagataagaaggaattatcaagacaagacttgatttatttttctgataaggtggaaaatgaaagtttaagagtttcagctgaagaagaagcagaacaaattgaggaagatgaatcaagaataaagaatgcctatatagccgaattaaacaatgaaatcataggtaaaattcatattgaatataatgatgactcagctttcatattgggttttggcgtgttaccagagtttagaggaaaaggctatggaagagcagtactaaaggcagctttaaaattaataagtgaaaaaaatataaagcaagtagaattagatgtagctgataaaaatagtagggcacttaatttatataaatcgtgtggatttaaagaaaaatctgtgatgaactattttgtgaaattttaagtaccgcttagtgtaaaggagaggctgctatcactatcgggttaaaatctgatagtgatagcttctgatgtagacaatatcatataactatttatatattcattaattctttataaagtttattagcttctccctatattttttcaaatattagcataatacttctaatgtagatgccataaaatagggccaaataaataaaaagataataatcatatttgactaaaatattgaaatatagataaaattatagcatcaaaatggtaatttatataaaaattatttagtaggaatgttttgaaatttaaggattttataggtaaaatatattaagaaaagggggcataacaaatgaaagatttcattaataattataaaggattaccaaaggaaatgtatgtgatatgttttgctacactcattaacagacttggggattttgtagtaccatttcttgcattatatcttactcaaaaaattggaatgacagctgcagcaaccggagttatagttacattatcatctgttgtaggcataccagcatccattttaggtggaaaaatatcagatatgtttggaagaaaaaaaatatatacatatgcacaaagtatagcagcagtaacattaataccttgtgctttcactaaaagtgtttcaattaccataatgtgtttattgataagcacattttttaatggttttgtacgtccagcatttcaatcaatgattcaagatatactttctaaggaagaaagacaagctggattttctcttaactacctagcgataaatgcaggagttgcaattggaccaataatagcaggttttttatttaataatcttttaccattattatttttaggggatacactaacttctttaatagcagtctttttggtatggaaaaatatcaaagagacttatccggttaatagtaaattaaaggttgaaagtaaagctgaaatagcagaaaagggaaatacgtttcaaatgctttggaaaaggccagcattaagtttatttctagttttatatatggtatataactttatttatgctcagcataagttttctttgcctataactttaaatgctcaatttaataatgaaagtgctaaacttttgggctacattatgagtataaatgctgtaactgttttagttcttacaatttttataggttttataactaaaagaaatcatcagttaactaatatggcttttacgggaatattatatgctataggatttggaatgataggatatattgataatttcaatttttttattatttccacaataatatggactttaggagaaattttaagttcaataagctcaggtgtttatgtggcaaataatagcccaagcaattatagagccagattaaatgcaataataaatcttggcagatttctaggtacagctcttagtacttttttttctggagcatatatccaagtttatggatataaaacattatggtttttaatattttttatttcaataatttcaggaatattgatgtttgttttaaaaatattttctgtgaaatcagaactagacaattatgcggaaagcaaaattaaaagtgttgtttaaaaatcgttaagatattcagggatgataaaaagttgaatgtgtgatttatttttgattaaaataagtaactttgttagaaagattaaagataaagatgttatagcattttcataactcaaattatcgcgacctattaaagagatatgagagtgtaatacaaatgtttaaatatataataaatgatattaaatcattggacaactattgctagcgtatcaatatgcataaaagctagaataatagtgaattatagagaagaataggaataatcatacttaatgccaataaaataaataatatgaaaacagtagagatgttaagataaaacacgtcgctaagagacatgaacaaaacaacttaaaagaaaaaagattttctaaaaaggttgttgacaatgtcgaatggtgatggtatgataaagatcctcgctaagagacgcataatcagtaacttgaaactgatagaactgtttaaattgaagttcaaaaagttttttgaaaagttgttgacaagcttcaaaagcggtgatatactaaataggctgtcagaaacgacagataacaacaaaacattacaacagtcgttgtaagaaagaaaaattggtctttgaaaattgaacagaataagataaatacatttaagtaaaccagcaatttttatttgagtaagctaagattaaactttttccaatatggataagttcaactaacatttagctgaaggtaaacttcatctaaattaagtttcactttatattgagagtttgatcctggctcaggacgaacgctggcggcgtgcttaacacatgcaagtcgagcgatgaagttccttcgggaacggattagcggcggacgggtgagtaacacgtgggtaacctgcctcatagaggggaatagcctttcgaaaggaagattaataccgcataagattgtagtgccgcatggcatagcaattaaaggagtaatccgctatgagatggacccgcgtcgcattagctagttggtgaggtaacggctcaccaaggcgacgatgcgtagccgacctgagagggtgatcggccacattgggactgagacacggcccagactcctacgggaggcagcagtggggaatattgcacaatgggggaaaccctgatgcagcaacgccgcgtgagtgatgacggtcttcggattgtaaagctctgtcttcagggacgataatgacggtacctgaggaggaagccacggctaactacgtgccagcagccgcggtaatacgtaggtggcaagcgttgtccggatttactgggcgtaaagggagcgtaggtggatatttaagtgggatgtgaaatactcgggcttaacctgggtgctgcattccaaactggatatctagagtgcaggagaggaaagtagaattcctagtgtagcggtgaaatgcgtagagattaggaagaataccagtggcgaaggcgactttctggactgtaactgacactgaggctcgaaagcgtggggagcaaacaggattagataccctggtagtccacgccgtaaacgatgaatactaggtgtaggggttgtcatgacctctgtgccgccgctaacgcattaagtattccgcctggggagtacggtcgcaagattaaaactcaaaggaattgacgggggcccgcacaagcagcggagcatgtggtttaattcgaagcaacgcgaagaaccttacctagacttgacatctcctgaattacccttaatcggggaagcccttcggggcaggaagacaggtggtgcatggttgtcgtcagctcgtgtcgtgagatgttgggttaagtcccgcaacgagcgcaacccttattgttagttgctaccatttagttgagcactctagcgagactgcccgggttaaccgggaggaaggtggggatgacgtcaaatcatcatgccccttatgtctagggctacacacgtgctacaatggctggtacagagagatgctaaaccgtgaggtggagccaaactttaaaaccagtctcagttcggattgtaggctgaaactcgcctacatgaagctggagttgctagtaatcgcgaatcagaatgtcgcggtgaatacgttcccgggccttgtacacaccgcccgtcacaccatgagagttggcaatacccaaagttcgtgagctaacgcgcaagcgaggcagcgacctaaggtagggtcagcgattggggtgaagtcgtaacaaggtagccgtaggagaacctgcggctggatcacctcctttctatggagaaatctagatcagcatgatgtctgactagtacagatacattattatgtatcaaaatataaaatacttgctcaaaggttacttaagtatttgttctgtttaattttgaaagactaagtctttcaaaatgcgtagcttagtagcgacaagtgcgagaaagcaaaaattttatgaaatgaagcgtactttacgtacgtaaatgagtaaaatttgaagctgacgaagcaattgacgataataagcaagcagatgttctttgaaaattgcacatagatttaatgtatatataaaatacaacaaagccaagaataaatattctttgtgatatgactaataattaggtcaagctacaaagggcgcatggtgaatgccttggcatcaggagccgatgaaggacgcgataagctgcgataagcttcgggtagacgcacatagtcagagatccgaagatttccgaatgaggaaactcacatgggaaaccccatgtatcataaagtgaatacatagctttatgaaggtatacccagggaactgaaacatctaagtacctggaggaagagaaagaaaaatcgattttcttagtagcggcgagcgaaaaggaaagagcccaaaccagagatttatctctggggttgcggacagaacataacgagaaatcatagttaattgaacacaactggaaagttggaccacagtgggtaatagtcccgtaagtgaaaactatgataatcagttctgcaccagagtaccacgagacacgtgaaaccttgtgggaagcagggaggaccacctcccaaggctaaatactacctgatgaccgatagtgaagcagtaccgtgagggaaaggtgaaaagaaccccgggaggggagtgaaatagaacctgaaaccatgtgcctacaaccgatcagagcaccttatgtgtgtgatgatgtgctttttgtagaacgagccaacgagttacggtatgtagcgaggttaagtacttaaggtacggagccgaagggaaaccgagtcttaatagggcgactagttgcatgctgtagacccgaaaccgggtgacctatccatggccaggttgaagcgagggtaaaacctcgtggaggaccgaaccacgttgctgttgaaaaagcatgggatgagctgtggatagcggagaaattccaatcgaactcggatatagctggttctcctcgaaatagctttagggctagcgtcggaaaatgtgagtagtggaggtagagcactgaataggctagggggcatagcgcttaccgaaccttatcaaactccgaatgccacatactatcagtccggcagtcagactatgaaagataagttccatggtcaaaagggaaacagcccagatcgtcagctaaggtcccaaagtgtaagttaagtggaaaaggatgtgggatttctaagacaactaggatgttggcttagaagcagccactcattaaaagagtgcgtaatagctcactagtcaagagatcctgcgccgaaaatgtccggggctcaaacttaccaccgaagctacgggttcacgcatttgcgtgagcggtagaggagcgtcgtaatcgggctgaagtcgtaccgtaaggagcggtggactgattacgagtgagaatgttggcattagtagcgagatgtaggcgagaatcctacaggccgaatatctaaggtttcctgagtaaagtttgtcttctcagggttagtcgggacctaaggcgaggccgaaaggcgtagtcgatggacaattggttgatattccaataccactataatcgttattatcgatggtgtgacggagaaggataggatgtgctagctattggatgctagtctaagcgtttagggagttgggattggcaaatccgttccaacaattctgaggcgtgatggggaaggttctatggaaccgaagtatctgattccatgcttccaagaaaagcatctagagagagaagtagtgcccgtaccgcaaaccgacacaggtagatgaggagagaatcctaaggccgacggaagaattgcagttaaggaactaggcaaattgaccccgtaacttcgggagaaggggtgcctgagaaatcaggccgcagagaataggcacaagcaactgtttaacaaaaacacaggtctctgctaaagcgaaagctgatgtataggggctgacgcctgcccggtgctggaaggttaaggggaacacttagtggtaacgcgaaggtgtgaacttaagccccagtaaacggcggccgtaactataacggtcctaaggtagcgaaattccttgtcaggtaagttctgacccgcacgaatggcgtaatgacttgtgcactgtctcaactgcaaatccggcgaagttgtagtgcgagtgaagatgctcgctacccgcgattggacggaaagaccccgtagagctttactgtagcttagcattgaatttcggtattgtctgtacaggataggtgggagactgggaaactagggcgtcagccttggtggagtcgttgttgggataccaccctgatagtattgaagttctaactggatgccatgaaactggtgacaggacattgttaggtgggcagtttgactggggcggtcgcctcctaaaatgtaacggaggcgcccaaaggttccctcagaacggtcggaaatcgttcgaagagtgtaaaggcagaagggagcctgactgcgacacctacaagtggagcagggacgaaagtcgggcttagtgatccggtggtacctcgtgggagggccatcgctcaacggataaaagctacctcggggataacaggctgatctcccccaagagttcacatcgacggggaggtttggcacctcgatgtcggctcgtcgcatcctggggctgaagtaggtcccaagggttgggctgttcgcccattaaagcggcacgcgagctgggttcagaacgtcgtgagacagttcggtccctatccgtcgcgggcgtaggaaatttgagaggagctgtccttagtacgagaggaccgggatggactgacctatggtgtaccagttgtttcgccagaagcatagctgggtagctaagtcgggaagggataaacgctgaaagcatctaagtgtgaagcccacctcaagatgagatttcccatagcataagctagtaagaccccttgaagactacaaggttgataggtcagaggtgtaagtatggtaacatatttagctgactgatactaataggtcgagggcttgaccaatataatcaagttgtaaatacattaaagaaactgtgtgcaattttgaaggaacaaatttcttaaaaggaatacaaatcgctttagcgatttgcataagttcgttcaaccaaatcatagatttgggaactcacttaatctcgtgatgatggcatagaggtaacactccttcccattccgaacaggaaagttaaggtctatagcgccgatggtactgcatgggagactgtgtggcagagtaggacgttgcgaggtaagcaaaaaagatagttgtaataactatctttttttattgtatttaagaataccacaagtttgacttgtggttccggaaagcttttagctataagtagaaaaaaataaacctccgttgtaaaattatagtaggtttgccgaccacaactataaagtacaaggaggtgtgtccgttaatggacattgatagtttagcacatagtaagtggaattgtaaatatcacatagtttttgcacccaaatttaggagacaagttatatatgggcagataaaagctgatataggaagaatacttagattattatgtgaaagaaagggagtagagattatagaagctaatgcatgtccagatcacatacatatgcttgtaagtataccgcctaaattaagcgtagcgcaatttatgggatatctgaagggcaagagttctttgatgatttttgataaacatgcaaacatgaaatataagtatggcaataggcaattttggtgtaaaggatattatgttgatacagtaggaagaaataagaaagtaatagaagagtatataaaaaatcaaatacaggaagatatagcttatgaacaaatgagtttgaaggaatatatcgacccgtttacgggtgagccggtaaataaaggcaagaaataaagcaccttttaggtgcagccggaaaaggttttgcggtcggcagaccatttcaacgtgcgagtagcacggccagtaacaaagccttacaggcgcagagcaagccacccgttttcacgggtggtcatgacttattatcataaaatattttaaataattaaattattgtatagaacattttaattgttctatatgtcctgtaaccttaaccttcctataaatctttgatataatcccattttcatctattacgaatgtacttctttcaatacctatggatttcttcccaaacatatttttttcctttaatacgccgtagagattacatacctcttctttttcatccgaaagaagaatgaatggcaattcatatttagcaataaatttatcatgagatgttagagaatctctgcttatacctaaaataacagcatttttcatttcaaaatcatccaaaccatttttaaaatcttgtgcttcttgtgaacagccaggagtattatctttaggataaaaatacaagatgacttttttatttaaataatcacttaatttatgttcttttttatcagatcctactaatgtaaaatcaggagctttcattccttcttctaaagttaaactttccattttaatacctccatgtcttttataataattattatctatcaagattaaatatttgtaaagtagaaaagagatattgcgactgggtttatttagaatatatgactgtgaattctaggcaaaataactaattgataaaaaatacatgcaaaatttaaaatactgttgacatatatagcaataaaatgtatactttatatcatagtaaacaactaagaataatataatataataatttttatcaagaaaggcggagggactggccctatgatgcctagcaacctgaattaaaaatctattttaatttaaggtgctaattcctgcagatattttatctgaaagataagaatgtacatatttttttgctactttcttatctagaaagtagctcttttattatctaaatgtctaattatttgtatatttctctaggattgtgataaaaatcaaattcaaagctaaatataatatctagaaaattagggtaacgtacaaatcatagtaaatatattaaaaataaaaattatataaaatgggggcaacaaattatgagtaatcaagaaagaaaattaaaatttgaaacacttcaacttcatgtagggcaagaacaacctgattcagcaacagattctagagcagtaccaatttaccaaacaacttcatatgtatttaaaaattctgcacatgcagcagcaagatttggactagctgatgctggaaatatatatggtcgtttaacaaattcaacacaagacgtttttgaaaaacgtgttgcagctttagagggtggagtagcagctcttgcagtagcatctggagcagcagcaataacatatgcattgcaaaatataactaaagctggtgatcacatagttgcagaaaaaactatatatggaggatcgtataatttattagcacatacgtttcctacaaacggtgtcacaacaacatttgtagatccatctgacctatcaaattttgaaaatgctattcaagataatacgaaagcaattttaattgaatcacttggaaatccaaactcaaatattttagatgttgaagcattagcagaaattgcacataagcataaaataccactaatagtggacaatacatttggaacaccatacttatttagaccgattgaacatggggcagatatagttgtccattcggcaactaaatttattgggggtcatggtacatcattaggtggagttattgtggactctggaaagtttgactggataggttcaggaaagttcccacaattatcagaagcagatccaagttatcatggaattaagttcgcagaagcagttggggctgccgcatatgtgacaagaattcgtgctattttattaagagatacgggtgcatgcataagtccatttaatgcatttatattattacaaggtttagaaactctttcacttagagttgaacgtcatgttgagaatgctttaaaagttgtagaatttttaaagaatcatccaaaggttgaaagtgttaatcatccatcgctaccagagagcgctgataatgctttatataaaaaatattttcctaagggagcaggttctatattcacatttgaaattaagggtggagcaaaggaagcacaggaatttattgataaactacaaatattctcactacttgcaaatgtagctgatgttaaatcattagtaattcacccagctagtacaacacattctcaaatgaatgaaactgaactagcagagtcaggaattaaaccaaatacaatccgtctttcaataggaacagaacatattgatgatataatttatgacttatctcaagcatttgaaagttaggagtcatttagttaataaagaaaataattatttagcttagttctaagaaaaagttttgatagattaaaagtttttggttagttacttaagaggcagaaggcaaacagtcaatatgagagtttgccttctatttttctttggagtgataaattcatgatagtaattaatatggtgtaaaacacaatattatgagaataatatagaattattagttataatttaaatgttttattctatagtcgctaggatacacacctacattagatttaaatactctactaaaatagaaggcatctttataaccgattaattcacccaccttttttatttccaagtcaggctgattaattaaaagctgtttggcttcattaatgcgaattctagttatatattttataggagttactccagtatatttcttaaaaatcttacttatatattcatttgtaaatccaaatttctcagaaatttcagttattgatgttacagaggcataattactaagcaaataattttcaagtagttggcttaagctttcgggtttcaggctgtgatgatcaattgaaaatgaagagaattctttattttcagattcaagcataacaagaatgctttgtaaagcagtgctaagttcctctatttttactggttttaataaaaaatcttttacaccatattttaatgcagtctgagcatatttaaaatcattgtatccacttaataccatagtctttatatgaggatgatttttgtagagatatttaattaattctaatccatcgtattgaggcattcttatatcagtaataactagagatggacattgttgttctatgagaggaatggcaatttctccattgctagcttcacctactaattcaaaaggaatagataaagaattaattttttttattatattctgtcttataagatgctcatcttcaacaacaataagtttataggtgtgtgtattgttcataaaaatcctccttatttagatgtacgggcccaccgattataaaaattgttttatttttttgagaattatcaatcgaaaatatagcttcagtaccatataaaagttgtaatcttagatatacatttttaagtcccattccaccaattcttaatgattttagttctttagttctgtttaaattatagagattagataataatttctctttatcttgatcacttaaacaaccaccattatcttcgatatatataagccacttttgatcgtttgttatagaagatttgatatctaaaatccaaggtggtgaggagctaaagccatatttaaaagcattttctactataggttgtattattagtttaggaattaaaatattctttgttgattcatcaatatttgaagtataaataaaatcacttccatatcgcattttcatacattcaatatatttttccgtatatgatatttctaaagataaaggaacagcagtttcatcgcatgttgtaatataacggaaataatcacacaatgcatgacatatattaattatttcgctattcatatcttcttcagccatgatacttatatttgttaaactgttatataaaaagtgtggattaataagagattgggtcgcttgtagttttgcacgagtttcttctgattttaataataaaatttcatgagaagaatctcttaatttttcatacatatcacaaaacgattgatagagctcagaaatttcaagtatattactattaattggaaccaatagagtctcattttcatttaatactctgtctatagttaccatctttgtagaattggttaaagtacttaaaggttgagttaatctacttgaaatcataaaacacaaaaatagtgtaaaaatgattgaaattatagctataataataaaaccttctttaaaagagtgcaaggatctgaaaacaacttccttaggttcaacagcaatgattgtccaattatatgaatcgactttttgatacgacatcagcacatcatgcttgctatctatattaataaaatacccaactgatggacttaaattatgttcttgtatagtattagtataatttatattatcttctggagcagatgaatatgggtaaactaactcattatgttcattatatatatagaatgatgttgaagggtttttttgctttaactctgaaattagagagaatatagtgttgcaatcttgtactacttcaacaataccttctggttcattatttcgattaaagaatacacgtgaaagtgaaagataatggtggtttgacatattttcaattttaataggagagtatgataatttatcagtaagaaaaatatttttttcaccatttttatctaatgtatccttataccatggtacagtattcaaatccacattgattactccttgaaagaaacctgatcctatacatattccattttgtgtataaagattaacttggctggctgattgaaagggtccgattatagcagtaataatatcatatatagctaaaacgttttctctagattgagtaaaatgttcgagatttattgtatctgtgttattatgcgtaaaactagtaaaattcttctttatagcattcgagtaaacaatattcatggatattgtggacatattatttaattcggttgatactgatttatgaatagaggcactgatagtttcagatttcgttttggctgttttataaatattatcactataaaagtaataaaaacaaagaaagaataaaaacaataataaggctactagtaacccataaatagaaaataagtatgtcttttgagaataacgtaatttataattcattataatcctcctctccaaaacacattatataataatgttcaaaaaagtgcaaaacggagttcttttttatctatgtctaattaatatacttagtgatattataagcatgtagccaatgtaaagcatatcagaaatgtggacaaatatttatattaatgggggtatagttaatgagtaaacgtttattaaaattagttagtgcggtttgtatgacagcactgatagggagtgcttttgtagggtgtggaagcagcagtggagatggaagtaaaagtgcatcgggaagtggagattcagttacattaacatttggatctcatcaatcaggtcttccaacatctggagttgtacaggatttggcaaaagattttgaaaaagaaacaggaattaaaattgattttcaaatttctccggatgctcaatggcgtgatttacttaaagtaaagttggattctggtgaagcaccagatattttctgcgcggatgccgatcctttaaatctagtaacaagagttaatcctgaaaaatacgtattagatgtatcaagtgaagaatgggtaaagagaatggaccctaatgttcttccttcaatctcatacaatagcaaagtttatggtattacctttccaggtaaaaaaatgtatttctatgtttacaataaagagatattcgataaattaggtttgaaaataccaactaattatcaagaattcaaaaatgtatgtcaaaaaataaaagattcaggagtcactccaatttatgaaggaactcaaaatggatggcatcaagtacttccattatttgaaacaggagcaatgtatcaacaaaagcatccagacttatataataagcttaataaaaatgaagttgatttagattctatacctgaattacaaactataatcaatgaattaaaagaatgtgctgatttaggtttttatggagataattacttaagtaattcagtagaaaatgcaaaagaagcaatggcaaaaggaaaagctgcaatgtttgtagcagaatcagcatggagaaatgaagtgaaatcggatttccctgattttgacgttaataaattaggtatatttgcaatgccttggggagataaccaaacaattggtgtgaatcctgcaagtaatgcatattttataaataaaaatggaaagcatgtagaagaagcaaagaaattctttgatttcctagcaagacctgagaatttacaaaaacgtttagatggacaaccaggattatcagaattatgctggcctgaagtaaaatcaaaatattcaaaagaggaccaagcatacattgattcattgcaaaaaggaatggttatgcaagctggcgttaaatatattgacagccaatggatggatattggaaaagacttagaggctatgtatagtggttcatcaactccaaagcaagtattagaaacaattatgaatagaagaacagaacaagctaaattacaaaaagatcctgattgggataaataattacggttatatgaaaataaggtttctccttttgaaaccttattttattaaaatggagggatttgaatggacagaaaaaaattatatccgtggtactttacaagcggggctctattaatatttttcttactttgctttttaccaggaattataggtatattttattcatttacagattggaacaattttaccgacaagatcaatttcataggattcaaaaattatgctgaagtatttaaggggaaaccggaataccgtgcatatttgtggaatacggtattatttactacagttacaacaatcatgaaaactgtagttgggctagctttagctctactattaacacaaaaatttatcaaactaaaaaactttcatagaatggttatcttttctcctcaagtaatgtcttatttagtagtaggacttgttttcaaaagtatgctacatccagatacaggatttgtaaataattttcttaaatctgtaggaatggatttcttggctatgaactggctgactgatttaaaaattgtttttgcaactgtcatgtctgtagatacttggaaaggtatggggtacataatggttgtaattattgcaggattgatgtctatttctcctgattattatgaagcggcaaatattgatggtgctagtttctggcaaaagttccgtttaataaccttgccattattaaaaccaattattataaatgtaacaatattaaatgtaacatatggatttagagtatttgatatgatttattcattaacaaatggagggccaggtaatgcaacaggggtaattaacacagcagtgtataaggaattttctaaaggaaattatgcaatgggtactacattatcgagtatattattctttggattattgctattagtatatttcattattaaatccatggaaaataaggaggtagatgcataatggtcactttaaagaagtcaattggaagtgtagcagccaatatagtaacaatttttataagtttattagtactaataccaatggtagttttatttcttaattcttttaagactcaaggtgaatccaataaaatgtccctttctctgcctaaagaatgggtatttgcaaactataaaacagtaatagaacagggaaaattggtctcatcgttttttaacagccttttatatgctacttgtagtgttttaataattgtaattgtagtagcagcagcagcgtttgttattgcaagaaatcgtaaaggtattaataattttatatactactttatcctttctggtatagctatacctattaacaatgttgcgttaatgaaagttttgcaagcattaaatcttgtaaataccaggttaggtattattcttgtttatgcagcaataaacattcctcttagcctatttttatcatatggatttatctcaacaatacctagagagattgatgaagcagctgttattgatggatgtggaccaattagattatttataaaaataatacttccattattaaaacccattatttcaactttatttgttttgaattttatggttgtttggaatgactttacaatgcctttatattatctaaataattctgcaaaatggccgatgacattagctgtttataatttcttcggagcatttgaaaattcatggaatttagttagtgccgatataatactaacattgttacctgtattaattatatttatatttgggcaaaaatatattgttggtggtgtttcagcagggtctgtaaaaggctaatagaacaggaatgttatagttagataatttagcatagtttaaatagaaagaataaataaaagaatagaatttataaagttcctaaagacgaaagcttattttaggaaacagagtaggagcgtgtattaatatgaaatttagcaatggatgctggctagacaagccaggatatcagatatttagccctcaagaagtttatagtactaaaatagaagaggatgttgtaattctttatgcaccatgtaataagataaaccaacgaggagatacattaaaagggccagttataacatataaaatctcttcgccaatgcaaaatgtaataagagttagagcatatcattttatgggacaacaaaaaaagtctccaaactttgaaatttataaagatgaagaggttaatattttaatagaagaaaatgaaaaaaatataatgtttaaatcaggagatcttaaagctgtaatagataaagatgtatttcaaatgagcttttataaaagggataaaaagctaacgtctagtatgccaagaggactagcatatgttaatactgctgaagaaagagtctttatgaaggttccagaagaaggagtcttcatgaaggaagaattacaattatccgtaggggaattggtttatggacttggagaaaggtttacccctctagtaaagaatggccaaagcatagatatatggaatgaagatggaggaacaagtacagagcagtcatataaaaacataccattttatattactaataaaggatatggagtatttgtaaatcatcctgaaagggtatcttttgaagttggttcagaaaaagtcactaaagttcaatttagtgttcctggagaatatctagattactttataattggtggagaatcaatgaaagaagtagttgaaaattatacaacactaacaggtaaaccagcacttccaccagcgtggtcatttggattatggttaacaacatctttcactacaaattatgatgaagaaacggttaatagttttgttgatggcatggcagatagagatctgccacttagagtatttcattttgattgcttttggatgaaagattttaattggtgtaattttgaatgggataacaaagtattcccagatccaaagggaatgcttacaagattaaaggaaaaaggattaaaaatatgtgtttggataaatccatatattgctcaagagtcaaagttatttgatgacggtatggaacacggatatttgataaagaaacctaatggtgatgtgtggcaatgggatttatggcagcctgcaatgggaattgtagattttacaaatccagatgcatgcaaatggtattcaggtaagcttaaagaattaattgatatgggagtagactgctttaagactgattttggtgaacgtataccaacagaggttgaatatttcgatggatcagatccatataaaatgcacaattattatactcaaatatataataaggtggtatttgagactttaaaagaaaatttaggagacgatgaggcagcagtatttgcaagatcagccactgttggaggacaacaattcccagtacattggggaggagactgtgaagcgaactatgaatcaatggcagaaagtctaagaggtggattatctctttgcatgtcgggatttggattctggagccacgatataggaggttttgagagtactgcaacagctgatgtatataagagatgggttgcctttggattattatcttcccatagtaggttacatggaagtagttcgtatagagtaccatggctttatgatgaagaagcttgtgatgtagttaggttttttactaagcttaagtgtagcataatgccatatttatataacatagctaatgatgcatcaaaaagagggataccaactatgagagctatgatgttagaattccaagatgatttagcttgtaattatctagatgaacaatacatgcttggagattctatcttagttgcacctatctttaatgaagaaggagaagcaaattactatttaccagaaggaatgtggactaacttcataagcggaaagaaatataatggtggaagatggatcagagaaagacatgattacttaagtgtacctatgatggttaaagaaaatagtttaattgctgttggaaatgaaagttctaagccggactacaattatagagagaatgtatcaattttggcctatgaattgaaagaaaataagaaaacagccacaagtgtcgtagacatgaaaggtaacaaagttcttgaagtggaagtcaccaaaaatgaaaaaagtattattattgaatctataggtactgaaggagaatggtctttagtactcaagaaattttctaatatagaaaatgttgataatggagtacttattcatcaaggagaggatacaataattaaatttacagatggaaattgcaaatgtaattgtaaaatagagtttagcatgtgaaaattttaatataaagcacatgtagtatatgtaataatctagaaggtaaactaaatttattattagttaacttctagatttttattatataatgaatattttataacctataattgatattataatggtatataataaaattagtaaaaaatataaatacagacttggagtgaatatttatggaattaaattggagtttaaaagaagtatatccatcttttgatagtgatgaatttaaacaagacttaaataaattaacagatattattgaagaaatcaataaatgggcattagaagctactaaaaataaagataacttagtagaaaaattagaagactatataaataaatttacaaaagtaacagatttatctagtagaattagtatttttataaatctaagcttaagcgtaaatacaaaggataagaatgcattgaggtattcagatattttagaaaagaaattaacaaatctaattggaagttcagttaaatttgaaagatatattagcagcatagaaggcctggatgaaataataagtaagtctaagctacttaaggaacatgaatttatgttaaaaaatatagttgaacaaagtcaatatttgctcagcgataaggaagaaagtataattgctaatatgaaaaatacaggctcaaatgcctgggcgaaacttaaggataatttgatttccacattattagtagaaattgaagaagataatgaaattaagcatataccattaacaatggttttaaatatggcttatgataaggatgcaactgtaagaaaaaaagcatatgaagcagaaataaaatcttataaaaaagtagaagaaggtgtagctgcagcattaaatggaataaagggcgaagttttaactgtttgtgattttaggggatataaatctccacttgaaaagacactcatagattcaagaatgagtgaagagtctttagaggcaatgtttttagctatgaaagaaagtcttccggtatttaggaaatacttgagaagaaaaggtgaaatgttaggtcataaaaatggactaccattttatgatttatatgcacctgtttgcgaagcagatatgaagtttacatatgaagaaggtactaagtttgttgaaaagaacttcagaacatttagtgataacttaggcgattttgcaaggaaagcaatcgataatcattggatagatgtgaaaccaaaggaaggaaaagtaggtggagctttttgtgagaatctacatttcaatggagagagtagaatactcctaaactatggtgataattttggagatgtagtaactctcgcccatgaattaggccatggttttcacggagagtgtttaaataatgagactacgttaaattcagattatccaatgccgatagcagaaaccgcatctacattttgtgaaacaataataaaaaaggcagcaataaaaaatgcttctaagaatgaagctttagcaattcttgaaactgaaattagcgattgcacacaagttattgttgatatatactctagattcctatttgaaaaatcatttttcgaagctagaaaaggaagttctttaagtgttgaggaaataaaggatcttatgctggatgctcaaagagaagcatatggagatggattagatcctgattttttacatccatacatgtggacttggaaacctcattattatgatgccgagtataattattataattttccttatgcgtttggattattatttgcaaaaggattatatgctgaatatttaaaaaaaggaagagctttttcaaaggattatgaaaaattgctttcaatcacaggaaaaaataaaatagccgatgtagcaaaagttatgggcatagatataaatgatacagaattctggagaaattctttaaaaactatagaagatgatatagaagaatttatagaccttagcaatagataaaagaaggtttgtggaattatccatcaaataaatatatatttatttgatggataatagatatagtaggggtagaggagtaattttagatgaagatattttataatacatcgactggtaactcattgtatgtagcaaaaatgataaaagaaagttttaaagattgcgaattagtatccatgagtaaggcgttaaaagaaaataagtttgatatttgtgaagatattattggatttgtatatccaattcactgttcaggactaccgattgtggttaatgaatttatctcaaagttaaagataaataaagatgtatatatctttgcaattggagtttcaggaggaggaggagcaaatactagctttattcaaattaataaattattaaaaagtaatattaaaataagtaattattgtaccattaggtatatttctaattatatgcgagcaggtagaaatcctactaaagctagagctgaggaaactataaaagaaaatgaaagtaagatagtggattttatagagtcagttaagagaagagatactaaagaaattaactttaaagctggaattggaaatttagcatataagatatggaaagatttttataaaaataaagataaaaactttaatgtaaatgagaaatgcattagctgcaatatgtgcaagaaagtttgccctgtagataatatcgtgatggaaaataatagacccaaatggttaggaaaatgcacagactgtatggcttgtataaatatatgccctaaagaagcaataaatataggaaagtctacaattaaaaagaatagatatttaaatccatatataaagagagaggaattaatatagagatataagataaaaaaataatcttgataaaaatattttgagtatagaataagggatatactttacatcctttgaatcacattaaatattataaagtacaaaaaaataatataaaaaaatcctaaaaacgataacataaatgtaataatatggtaaaatattcatataaataatatatgaatggagttgtcaagtaatggttttttttaaaaaagatgatattcaagaaaaagaagttcaagtaactaatgaaactaaaattgagaatttaggaattgataaaagaatttctaaaaagaaaaatttatctctttttgatgtagatacgattcagtatgtaattaaaaattttccatccatgtccattgaaattcaaagtggtctgagcaacttggcaagcatactagaaaatacaatagaccacattgaagataaatcaagtgaaataattaaaaaagatagggattttaaattaagtaaagctcatagagatacatctatagctatatatagtgttgttgaaaacataaatgaatatgttaagtggatgcaagatgaatatgagaaaaatatacaatctgataaagaaagtatttgtaaggtaagaaaagatttagtagaagttaagaaagaagcatctatagataaagaaaaacaagaattaaaaaatacctcaattaatgatgaagctatagaaatatataaagatttttcattaaaagaacctaaagcaataaagttggatggtaatattatagaggttgaagattgggatgacttacttgttaaaacagctgaggtccttacaaaacaatataaaaaaaataaaaatatcaataagactatgaaatcaattaaaccagttgaaaaaaaatctccacaaaattcttttagagatacggttatagatatgttaacagagtataagataaattttgatgaatttaaagttatagtgaagtaagatatataggggaattcttatatttcaaataaatcagcttacgtgcaaagaaatatttgcattttaagctgattttttatatagttaaataataataaaaatattgacaatgaatattataaaaagtacaatatgattataaaagattgagttaaatttaatttataaaaatttaatttttcttatgaatagtaaatataaaaaagtttaaaatagctagagatatgtttaaaaaagctttagtttaatttataagatggaggaataaagtatgaaaatagtagatactaacgaatttaaaaatgaaatagagagtggagttacagttgtagatttctttgcaacttggtgtgggccttgtaaaatgttatctcctgtgcttgaaggattagcaggcgaaatggaaggaaaggctaaatttattaaagttgatatagatcaaagtttagacttagcaaatgagtttcaaatttcaagcgttccaacaatgataatattcaaagatggacaaaaagcagagcaacttataggatttttaccaaaagaaaaaattcaacaagcaattgaaagtaatctataaaatattttctacattaaaaaacatagtgcaatattaaaatgtactatgttttaattttaaaaaaataagttgaacaaaatttaattttatgaagtttactttttaagcataattatgtaaggagagataatcatgaatttttatagtttttctgcaaataaaatgaatggtcaagaagtaaaaatggaagaatataaaggaaaagtagttttaatagtaaatactgcgagtaagtgtggatttacaccacaatttgaagagttagaagatatttataaggaatataaagatcagggattagaaatattaggttttccatgcaatcagtttgccaaacaagatccatctagcaatgaggaaataaattcgttttgcaaattaaattatggagttactttcactatgtttgagaaaatcgatgtaaatggaactaatgcacatccgctatataaattcttgaaaaataaaaaaagaggactctttaataagcagataaaatggaattttactaagtttttagttaataaagatggagaagttatagggagatattctccaacaacaaagccatcaaaaattaaagaagatattataaatttgttaaatgcttaaattattgcatttttgaaatagacattaagtggtgcagaagatatattataattatatagtttaaataagatagtttataatagaaataggtttataattaaatatacgtaaatggaggaaaaaagatgagcgaaagatatgatatagcaataataggaagtggacctgcaggtttatcagctgcgttgaatgcaagaataagaaaaaagaattttataatatttgggaataaggaacttactagtaagcttgcaaaagctcatgaaataaacaactatctaggtttttataaaaaaagcggtaaagaattgcaagaagagtttaataaacatttagaagaaatggatataaatataactgaagagcgaattaataatgtatatgccatgggagactattttgctttaatggtaaatgaaaaaatgtatgaagctacatcggtaatattagcaacaggcgttgagtatggaaaattatttgacggagaagaaagacttcttggaaagggagtaggatattgtgcaacttgtgatgccccgttatatagaggaaaagtagttacaatagtttcttataataagcatgatgaagaagaggctaattttattgcatcaatagcatctaaagtaaattacattcctatgtataaggaaaaagttgaggtagacccttctatagaaattataaatgatacaccagttggaattataggagaggataaagtaagcaagctgaagttaaagaattcagaaattgaaacagatggtatttttatacttagagatagcatttctccagggcaattagtaccaggattaaagatagttgataaccacattgaggtagatagattaatgagaacaagtattaaaggatgtttcgcagctggcgatattgttggaaagccatatcaatatataaagtcagctggagaaggaaatatagcagctttatcggcagtaagttatgtagattctgtttctaaaaaatagcaaagttatagaaataagagatcttatctataatattgcgtctaagtaagctttatgtattggacgaaaagtgctatattaaaattgacatgccaaagcaaaaaagttaaacttactttggtttgttaaaattaaatttatataaatgatatggcggttataggagaatgaattatgaataaatcaaaaaaatatgaaagtatcaaattagacaatcaagtttgcttttctttatatgcagcatcaagggaaataataaaattatataaaccaattctagataaattcaatctaacatatacacaatatatcgcgatgttggtattatgggaagatgaaaagagtacggttaaggatataggacgaagattgcatttagattctggtacattgacgccactattaaagaagattgaaggaatgggactaataacaagatatagagacacaaatgatgatagagtagtaattgttgaattaactgaaaaaggaagacttctaaaggatgacatattagaagtaccacgtcaaatagtatgtaaagctaacatatcaactgaaagtgctattgaattaaaaagaaatttagatgaattattaaaatctttagagtaactttgactgattttgtctgcgctttgattagatattttttggaggaatttctatatggaagatgtacttaataaattaaatgggaatgaattttttcaagatttaagtgttgaggaaattagagatcttatttcaaatattggatataatttaagatcatataaaaagggagaaattattgctaatgaagaagatgaatgcaatagcttaggttttgttttagaggggatagtcgaaattcaaagaatataccttagcggaaaacaaataattctaaagaggttaagtaatggagatgtatttggtgaagcattagtattctcaaagaaatcaaaatatccatctacagttatagcctttagtgaatgcaatatactttatataagcagagcagacatactaaaattatgtacaagtgatgaaagagtattagggaactttatgtcttcattgagtaataagatatttatgttaaattcaaagataaaaagtatagcttttaaaagtatcaaacataaggttataaactacatattagaacaggcaaagagccaaaaaagtgaaatagttaaactgaaagaaaataaagaagaaattgcatcgtcactaggtattcctagaccatctttatcaagagaattaatgaatcttagagatctaaattatattgagtttgatagaaatataattaaaattttaaatattgaagagttagaagcagaattatttgattaaaatgatatatattgatatttcataagtcagaggtatacgtagaaaacattaatataaaataattttattacaatagaataattaggttagcttactatcgtaaatattattctattaagtttatagtaagtaattaggagttatttatgaaaaatatttctgaagaacagttagaggagttagaaatttttaatggtgtttctaaagcatctctaagcaagcttaaggattttggagaagttaaaaagtatcagcctggaaatcatctttttagagataaggaagaagtatctactttatatgtagtattaagtggaagtatatctctatataaattgaatgagaatggaaataaacgtgtaatattcattttgggtaaaggtaaaatgattaatgatgttattatacaagatttaccgtcgtctataaattgtgagatatttgaagagtcttacatattaagttatgataaatctacatttttaaagattatggaggatgattttatccttaccaagaatgttatgttctcattagctatgaaagtaagaagattgtataggcagctaaagaatgcaacaggtgtagtaagaatggaaaagaaacttgcggcaaagctttggaaacttagcagagattatggagttaagtgtgaggatggagtaactattaatatgaatataagtgtaacatatctagcagatttacttggttcaaaaagagaaactgtatccagatcactaaaaatacttttggacaataaattaattaagtatgataataaaaagattaaagtaattgatcaagataaattatcaaaattttttaaagcaccgtgatttatatcacggtgctttattcataaataacttataattaatttataagtaaacgtatatatgaaaggggaatttatagtatgttttgtgaagaatttaacagtgtaattatggcagccaaggcaaaagttaatttattaaagacaaataaactaggatatttcataagctcaatgcttgcaggtctttatgtaggtatgggaattatgcttatattcacaataggaggattattaggtggtagtggatcacccgctacaaaaatagtcatgggagtatcctttggagttgcccttagtttagtaattatggcaggatcagaactttttacaggaaacaactttattatgacagctgcttctttaaggaaagaagtaaagtggacagatactattaacatttggatagtttgttttataggaaatttagttggttcaattattgcaggatatttattttattctacaggacttacagctggacccgttggagagtttattgcaaaaacatcagcagctaaaatgagtgtaccatttttaccattattagtacgtggaattttttgtaatatactagtatgcttagctacatggtgtagtttcaaattaaaaagtgaatcagctaagcttattatgatattttggtgtttatttgcatttataacagcaggttttgaacatagtgttgccaatatgactcttttgacaataggattacttaatccgggagctgcaagtgtaagcgttatgggctatgtgtataacataggtgtagtaacacttggaaatatgattggtggagcagtatttctagcattaccttattatataatttcaaaaaagaagtaaaggagtaagctgatgggatataaattaagcaaaaatgatattaataaagtattcgaagatttatcaaaagaatatgtagtatatgcacccaaattatttgaaggtgaaggtagtttctctgatactgatagagtacgttatggtgaaataaaaacaatagatgatatagtttttgatcaaaaggcccaatattcatataaagaagtattacttcctatatctcaaacacttttctatttcacagaagattccataaaggaagcagatgctcctaaaaaaggtgctatcattttcttaagaagctgtgacttacacgcggtaaaacgtatggatgacatttatttaagaaatggacaagaagattattattataagagaataagagaaaatgcaaagtttattttaatgggatgtgaaaactcatttgaaaattgtttttgtgtaagtatggaaacaaataaaaatgatgaatataatgcatacttaaaagtagatggcgataatgtatacgtagatgttaaagatgaggttttagaaaatctatttaaagctgatgaaactttagatgttaaaccagactttgtaacggaaaatagtgtaaaggtttcgataccagataatctttctttagatgttatgaaatcagatatgtggaaagagtacagtgctcgttgtattgcttgcggaagatgtaattttgtctgccctacatgtacttgttttacaatgcaggatgtcttctatactgataatggtaaagcaggggaaagacgaagagtatgggcatcttgccatgtagatggatatacagatatggccggaggacatagttttaggttagataaaggacaacgtatgcgttttaaagtgctacacaaagtatatgactataaaaagaaatggggatatcatatgtgcgtgggatgtggaagatgtgatgatatctgcccagaatatatatcattctctaactgtgtgaacaaattaaaagatggtatgaaagaggtggcagacaatgagtaaaaatgaatatattccttttttatcggaaattaaagaagtaattaaacatacagaaatagaatatacttttcgaatggagtttagtggtgatgtaaaaccaggacagttctttgaagtttcattaccaaagtttggtgaagcgcccatttcagtaagtggtattggagaagggactgtagacttaactataagacgtgttggaaaagtaactaatgaaatatttaataattatgttggcgataaattatttctaagaggaccttatggtaatggctttgatattgaaaattacaaaggaaaagaattaatagttgttgcagggggaacaggtctttctccagtaagaggagttgtagattactttgcaaaaaatacaggtgaagcagaaagctttactctaattgcaggatttaaatctcctaatgacgttttattcaaagatgatattaaaatgtggaaaagtaatataaatcttattctaactgttgataatgcagaagaaggatacaatggtaatgttggaatggtaacaaaatatattcctgatttactaataaaggatattaataatgcagcagttattgtagtaggacctcctattatgatgaagtttactgttgcagagtttttaaaacgtggtatagatgaaaataatatttggatttcacaagaaagaaaaatgtgttgtggaatcggaaagtgtggacactgtaaaatagatgatacttatatttgtttagatggtcctgttttcaattattcaaaaggcaaattcttaatagattaggaggggttagttgtggatttaaatacaaaggcaatcaagaaaaatgcttttagagtcactaaaaaaagagggataactgcctctagaattagagttcctggagggcatttagatgcagaattattaggaatgatacaagaaatatcacaaaagtatggtgatggaactgttcatataacaacacgtcaaggttttgaagtaccaggtataagctttgaggatatggataaagtaaatgaattgttacaaccaattattgaaaagttagaaataaatcaagaaataccaggtaaaggatatactgctgcaggaactagaaatgtatcagcatgtgttggaaacaatgtttgtccgtttgctaattataatacaactaattttgcaaagaaaatagaaaaagctattttcccaaatgatttacattttaaaatcgcattaacaggatgtcctaatgattgtattaaagcaagaacacatgactttgggataattggaatgacagaaccacaatataatattgatagatgtgtaagttgcatggcatgtgtgaaagcttgcaagaaaaaatcagtaggagcactagaagctattaactataaaatcgtaagaaataaagaaaaatgtattggttgtggtgaatgtgcaaatgcatgtcctacaggagcatggacaagaagtaaagaaaaatattataagttagttcttatgggaagatcaggtaagaagaaccctcgtcttgctgaagatttcttaatttgggctgatgagcaaagtataattaaaataatattaaatacttataaatttgttgaagaatatatagacaaagatgctccaggtggaaaagagcatattggttatataattgatagagttggatttgaagaatataaaaagtgggcattaaaggatgtagaattctcagaaaaaactatcatcaaagaacgtatttattggagtggaatacatttctgctagaattaaatgtatcacaaagaacttaaaatgaggaaatgaacaatcgaaatagaatacatatatgtggagcaggcattgaaaaataagctgttgaaatatcttaatggcaggttgttgcacttttgcttgtcctgtgcttgccacaggagcatgcataagtgatgcaaccttccatttagatattatcagcgagatttttcatagtcctgaggaacatatatgtattctatttctttgtattgctatttcacaggaaacctaattaaatagattttatgtatattgtattaaagagcataaatatacgtagctaaaggtattgctaacttgaagaatatagaaatatttgtatagatatatcaaactttaaatttatattcacaaaaaactggagtaaagacatatattcattttcggttatttgtaagtaaatttaaattattataacactacaaatatttttatatttaaagtcattacaataactttaatttatggtgacttagagtatatatggattctaggttatttttatgtatttataaaaataattccaaaagatttctgagtcgtaacaaatgaaacagagtattttataatttcaatgtaaaataggttcataaggtgattcgagggaatttgcttaaataatatagaaattaatgaaaatttattagataaaaattaattgtgtggaggagatttcaatatggataataaaatgttttgttttcaatgtcaagaagcagcaggatgtacaggatgtactgtaaaaggtgtgtgtggtaagactccagaccttgctaaaatgcaggatttattaatatacgtgactagaggtttatcagaagttgcaacaaaagctagagaagaaggtatcgttgtatcacaagctattaatactacagtaacaatgaatcttttcactactataactaatgctaactttgataaagaagtattttatggaagagtaaaagatactttaaaaataaaagaagaattattaggaaaattagctaacaaagaaagcttaagtgcagctgcgttatataatgcagaaacaagagaagaaatggaagctaaagcagagactgttggtgtattagctactgaaaatgaagacatcagaagtttaagagaacttattacttatggattaaaaggtttatctgcatacatgaaacatgcaaatgctttaggatatgaagatgaaaatatatgtgcattcatgcaaaaagcattatcattaactgctgataacaacgtaacaatagatgaatatatagcattaactttagaaacaggaaaagttggtgttgatggaatggctttattagataaagctaatacagaaagttatggtaatccagaaataacaaaagtaaatatcggagttggaacaaatccaggaatattaatttcaggacatgacttaaaagatttagaacaattattaattcaaacagaaggaacaggagtagatgtttatactcactcagaaatgttaccagctcattattatccacatttaaagaaatactcacacttagtaggtaactacggaaacgcatggtggaaacaaccagaagaattcgaaagctttaatggaccaatacttatgactacaaactgtatagttcctccaagagatagctataagggtagattatatactactggtgcatcaggatatgaaggttgtactcatatagctgctgacgaaaacggaaagaaggatttctcagcgattattgaacaagctaaaaaatgtgcagctccaactaaaatagaagaaggagaaatcgttggtggatttgctcacaaccaagtattagcattagctgataaagtagttgacgcagtaaaaactggagcaattaagaaattcttcgttatggcaggatgcgacggtagacaaaaagctagatcatactacacagattttgctgcagcgcttccaaaggatactgttatcttaacagctgggtgtgcaaaatataaatataacaaattagatttaggagatattggtggaattccaagagttttagatgcaggacaatgtaatgattcatattcattagcagtaattgcactaaaattaaaagaagtatttggtcttgaagatataaatgaattaccaatagcatttaacattgcttggtatgaacaaaaagctgtaatagttttattatctctattacacttaggagtaaaaaacattcacttaggaccaactcttccagcattcctttcgccaaatgtagctaatgttctagtagagaacttcggtataggtggaattacaaatgttgaagatgatatggaaatgtttttaagataaattaatacaagataaatgatggaagaagatagctagtataaaattagttatcttcttcctttttagttagaatgcaacaagatggagagataatattgtgctgtcgaaaaatatttaaaaataaagttggactgaaaacgtatttataaaaataaatatatttacatcaataatatatagatatataatctgtatgttgtaataacggggaataagaaggttgagaaaatcctttttattacctgttgtataaatttgaaattgcataataatttttacaatacgggggaagaattatgttaaaaaaaattcaatcattattgattggaagagctcttaaaactaacgaattagctgaagaaaaatttagtgttctttggggattgccaatattatcaagcgatgctatttcatcggtagcttatgcaagtgaagaaatactattagtccttatacctattcttggtatgcacgcatatggatcgatgatagaaatagcaatagcaattacagttttattaggaataatagtgttttcatatagacaaataatcgataattttcctcatgggggcggatcgtatattgttgcaagcgaaaatataggtaagcttccaggattggtggcagcgtcatcattgataattgattatttgctaactgttgcagttagtacctgtgcaggagcagctgcaataacatcagcaattccagcattgttgccgtatcaaccgttaatagctatttttgtaatagggttaataacattagggaatcttagaggaataagggattcatctaagttatttggaataccaacatatttatttatattatcaataataataatgatagtaacaggagtattcaaagtattagtattgaaagaaactccggagcaattatacgtagttccacaagctgctggagatttgactttgttattattcctaaaggccttttcttcgggatgtactgcattgacaggtatcgaagcggtaagtgatggaatacctaattttaaaaatccagcccaaaagaatgcaaaaatagtattaggaacattagcttgtattgtttttactatatttggtgggatatcatatctctcaacaatgtacaaagcagttccaggtcaagatattacagtaatagcacaaatagcaatccaagtttttggacaaaatagtttaatgttttttatagtacaagctacgacagctattattcttacacttgcagctaatactgcattttcagatttgcctctactgttatcaatattggctaaggatggatatgttccaagacaacttgggaaaagggggactagattaagtttttcaaatggaatagtattgttatttctagtatcttcacttttagtttatattgcagatggtagtactcatatgttgttatctttatatgcggttggtgtatttatatcattcacattatcacaatttggaatgtttagaaaatggactaagagcaaggaaggtcattggagacataaagcgtttataaatgggttaggggcagctgttacagcagcaacatgcataataataggtgtagagaagtttaagcatggagcatggattgtgctcgtatgtataccgatactcgttacaggaatgttaagagttagaagacactatactaaagttagagaaaacttaaaaatagaaacaggtttagagagtttaattgtaagagaagccataactaaacatgttattgtaccagttcaaacaattaataaatctttcattaagagtttaaattgtgctttaactcttggtgagaacatagaagtttatcatgttagtacagatgaagaagtaacaaagaagctaatagaaaagtataataagcttgggatagcagcacaattagttatagaaaatgctccatacagaaatgttaatgagaaacttttagcgtatgtggaagaaaaacataagcagttaaagaaacatgaagtaataacaatagtaatgcctcaatttatcatacataaatggtggcatcagacacttcataatcaaacatcaatactcttaagaagatctatacttaagatgagaaatgtagttattgtaactgtgccttatataattaatgaataggatcatataatatagaaaggagagtatctcaaaaatatttgagatactctccttatttccagagaaatataatatttaaagctaaaatagaaagtacaagtaaaagttaaacttaaaaagtgtaatctaactttttgttattatttatcagagaagtctaaatcaactttatctaaaggaataactttagtcttattctttattttataacctacgtataagaccaagaataatggaagtcctatataagccgcaattaatccattccaatcaatcgcctcaggagtaatgtatgaatatccttgacctattattataataatacacattaataatgctaatatagggccaaatggatataaactagccttatatttcaattcgtttaaatctttaccttgatgaacatatgcctttctaaatctgtagtgacatattgcgatacctacccaagctataaatccagcaagaccagatgctgcaactagccaaacataaacagtactctctgcatataggcctgttaaaaaacaagcagaagctattaatgtagttagaagtacggcatttataggtacacctctattatttgttttagcaaaagctttaggagccatgccttctttagccattgcataaagcattctacttgatgcatacataccagagttaccagcagataatacagaagttaatataattgcatttatcaatgaagcagcaccagctataccagctctttcaaacaccattgtaaatgggcttgtatcaagtccagcttcggtaaatggtattattgctcctaatacaataattgtacctaggtaaaatattaatattctccaaaatattgattttatagctttaggaatatttttcgcagaatcttcactttcacctgcagcaattccaataagttcagtaccttgaaatgaaaaacctgcaattaagaaaattgaaaatattgatttaatccctccgtggaaaggtccatcttcaatggtgaagttatgaaatcctactttatctccacccattattcctacaatcattaaaacaccaattactatgaatataagaacggtaacaaccttaatcccagcaaaccagtattctgattcaccatatgccttagatgatagaatatttaaacccactataattactaaaaataaaatactccaatatagggaatttacatctggaaaccagtatttcatcaacagagcaccggcaaccatttcggctgcaattgttatagcccagttgtaccagtagttccagccaagggcaaatccaagagctggatcaataaatttattagcatatgagctaaatgaaccagatattggcatatgagttgccatttctcctaagcttgtcattaaaaagtataccatgatacctactagtgcataagctactaatgcaccaccaggaccagcttggtggagagtatcacccattgcaaggaatataccggtaccaatagatccgcctatggctatcatgtttaagtgtcttgcttttaaacttctctttaattcgtgattttcttcactcatttttctatcctccattatggttttaaatttccataagcaagtaactaagataatataaaaattaaaacaataaaaaaagccatgagagcatactcatgacataaatacgaaagttacacattttaaaaatatgacgaatatcgacatttacattaaaaatagctctccacaaaataagttgtggcagtcttgtatatattttacacaagcccagcaaatagtattaaagcaatcaaccatttacttcggcgaaagttcctttcttattacttcaatgagcttacctccataataatactcttaaatttcgcgcctctatcttagttatttacctattaagttatatgtaattatgtaataaaatgaggaataagtcaatataaaatatttaacaatttataaaaatgcatagaaaatgactaaaaagtttgcagattaaaagcgactatttgaaattatttcaatagtcgcttttttaatatttataaataaatatactatcttagcaatgattagtgttatatttaagctttttatgcaagtcggcactatagcaagattatatatttaaaatgacattttttattctaaatttaatttattttttaatatatagcttgttattatgaaataaactattatgaagattatattaaatactgtgatagatattaaaaataaattaataggccaaagagattcaacatttcttagtaaatcaggcagtctagaggatgaaaaagctataccaatagatgatgatattgcacctgcaattaaatttaatactataaatgccccgaaagatgaaagaattctatgcttactaaatatatgcccaattgatatagaagcataaatcatactaataaattttacaaactgaaagaccatagcaattaataattctataataattacataaatttgtattcctattttagcataaccttctgaaagagccctgaaggtctcagagaagaattgtccaaaagccctagggtcaaatgccataataattattgaaagtatggctacaattccacttattatagtccaaaaagttgcaattgaaagtttacttgtaatatttgtgatggtgccaactggaagggtgttcattaaatatccttcatcaccaagcagatttttataaaatctttggataattatgaaaaaggtgactatgaatacagcagccatagtacatccgtatccaaagatgcttagtataaatgggattgaaccaaatccttgaagtttatgggatagaccagttccgataaaaactttattaatgatagcaaatgctaataatactaaatatagcggtataagggttctgccagttgcttttacctcatacttcattaattttcctaacatctaaatacctccctaaatagagcatcaacactcttgccttcattttctcttatttcatcaacacttttagttaagaatatattcccatatgatataaatactacatcatctaatattctttcaatgtcagaaataaggtgagtagatataattatagtggcattttcattgtaattagtgattattgtatttaaaatataatctctggcagcgggatcaacacctgcgataggttcatctaataaatacaaatcggcctctctactcataaccaaaataagttgtactttttcttttgtaccctttgacatggtttttaatttatcattgggattaatgttaagtttcgataacatattgtaagctttctcaggattgaaattatcgtagaagtcctgaaaaaaattaatgatgtctgaaactttcatccagtcattaagataagtcctttctggaaggtatgaaacaattttctttgtttcaattccaggtttatttcctgatattaatatttccccacttgatggagttaaaagaccgtttgctagttttattagtgtgcttttaccactaccatttggacctaaaagtccaacaattctaccacgattaatttttagatttatccctttcaatgcctcagtattagaataagtcttaaataaatttctacattctaaaatagggacattatccatattgctatttgtaaaagtagacattgtatcactttcgctagagttatacaatattttattatcatcattactcattatttcatctcctttgatataatttctataagttggattgtctcttgattggtataaccgattttctccatgttgtggagaaatttttcaatttgatctcttgctaaaccatttcttatatttttaatcatattaacgtcctccgtaataaatctgccacttgttctttgagaaaatactaaaccagttctctcaagttctgttaatgctttctgcattgtattaggattaacagctgcatcacctgccatatctctaactgatggcaatttttcgccagctttgtatatgccagaaacgattctaagttgtatttgttccattagctgcatgtaaattggtctatcgtcattaaaatcccatgacatagtctcactccttcataaattgtactactgtattgttgtactaagttgttaatacaataatacaactataatttttagctgtcaagaaaaataaaatgattttttgtaggttaaataaggcaatgaaatctgttgaatattaaaaattgtggtgttataattattttcaatggtgtatatacacctgtaaaattaattaaaagaggtgtaaataaagtggcgatggatttagcaaaagaaatattaaagttaaagagagaaaagaatgcactcattcttgcacactattaccaaccaggaattatacaagacttagcagattatgtaggagattcttattatttaagtgaaatagctagagattgcaaagaggaagttataatgttttgcggggttagatttatggcagagagtgcaaaaattttatcaccgaataagactgttttaatgccatgtcctagtgcaggatgttctatggcagatatggcaagcggcaaggctttattggaactaaaggaaaaacatccagatgcctatgtagtttgctatataaattcaacgtgtaatgtgaaagctcattgtgatgtcgctgtgacatcttcaagtgcattaaaaatattaaagaaaatacctaataaaaagattatgtttttacctgataggaacctaggtgaatatatatcagagtttttccctgaaaaagagttcatattatgggatggattttgtaggtgtcataataaggtaagcagagaagatatattgattgaaaaagaaaaatatagaaatgcaaaagtattagtacatcctgaatgcacaaaggaaatcagagatattgcagattatatagggagcacaagtgggataatagattatgcaactaaagatgaaggaaccgagtttataatagcgacagaagaaggaattttacatgaattaaagaaaaggaatcctaataaaaatttctttataccaggagatagaatatgttgccaagacatgaaaaagacaacccttgaaaatttatatgatgccttattgaatatgaaaaatgaaatgattctagaagaaaatgttagaaaaaaggcgttaagatcgttagaaaatatgcatttacttgcatcgcaagatgttagaagtaattaggaaaaatatgaataagtttgttgatgttctaataataggttcaggggtatcaggtctttattgtggattaaatttaaggaaagatttaaatgtcttgattgtatgtaaagataagattacttgcagtaacacttatctggcacaaggaggaatatctgttgcaaaaggtgttgaggatattccactatatatagaggatactttaaaagcaggaagatacaaaaatgatttggaggctgttgaaactttaattaatgaatctatggttaacatagaattattaattgaaatgggacttgcttttgatagaaatgaagatggaagtttaaactttacaaaagaaggcgctcattctgtaaataggatagttcatacaaaggataatacaggagaaagtactgcaaaaattttaattgataaagtgaaaaagagagaaaatataagtgtttatgaaaatactcattttgtagatattatagaaaaagaaaataagtgcattggagccttgttaataagagaaggtgagcaaataaatgtttatgcaaaagctgttgtattggcaactggaggcataggtggattatttaataattcaactaatcagagaatattgacaggagatggaatagcgtcagcaataagacacaatatagaattaaaggatatgaattatattcaaattcacccgacagcattttatgaagaaggtgaaaataagaggaaatttttaatatcagaatctctaagaggggaaggtggaattcttacaaatataaaaggggaaagattcataaatgagcttttgccgagggatgtggtatcagaagcagtatataatcagataaaagagacagaagtaccttatgtaaatttagatataaggtttttgggaaaagactatataataaatagattttcaactatttatgaggaatgcttaaaaagaggaacagatataacaaaagaatgtattaaagtttctccagctcagcatttttttatgggaggaataaaggtagatttggattctaaaacatctatgaaaaacctatatgcagttggagagacaagctgtacaggagtacatggtgctaacagactcgcaagtaattcattacttgaaggacttgtattttcaagaagagctgcaatatcaattaacaacattgtggattatttggaaattaaagtttttcctgtggaaagattagaaaaatcatgggaagaattacaagaagaaaataaagagatgactgttagaactataaaagaaaagggtggaaagttagatgataaattatttagttatagataaaataataaaagatgcacttattgaagattgtccaaatgaggacataaccacaaattcaatcataggagaggaaagtatctctacagtagaattgatttgcaaggaggaaggcatagttgcgggccttgaagtatttaaaagagtatttgatttattaggaaatgtggagattgaattttataagtgtgatggagataatgtacatgtaaaagacaaaattgcttttctaaaaggtaatacaagaagcttattagttggggaaaggattgcactaaatttacttcaaaggatgagtggaatagctacattgacgaatagatttatacaagaaataaaacacacaaagataaaattattagatacaagaaaaacaacaccaaatttaaggatattagagaaatattctgtaaagattgggggcggatgtaatcacagatttaatttatctgatggtgtaatgattaaagacaatcatattagtgcggctggtggaataaaaaaagctatagagctaacgagaaaaaattcttcatttgttagaaaaatagaggtagaaactgaaaatttagaaatggtgcaggaagcactattagcaggcgcagatataataatgcttgataatatgggtttagagatagctaaagaggcagttgaaataataggaaaaagagccttaatagaattctcaggaaatgttgaactaaataatattaaagaaatagctgaaataggtgttgattacatatctgtaggagcattaacacactcagctaaaatattggactttagtttaaaaaacttaacattgttagaaaattaaaaactgataattaatatttctgtatcaaatgaaacggatttaatacgaacattctattataataattctataagttgattgatttatctaaattctatatttcaattactagtgtatggtcaaaggttaatgattagtgaatttaaatgagtgtgaaatttaggaggagaattttatgataagaagagttattaaaatagatgaagagaaatgtaacggatgtggtgtttgtgcaagtgcctgtcatgaaggagctataggtatagtagatagaaaggcaaaattattaagggatgattattgtgacgggcttggagactgtcttccttcatgtgaaactaatgctatttctttcgaagagagagaagcagctgcctatgatgaagaagctgtaaagataaacatggagaaaagaaatacagagcaaaagaaatttgagtcaaacaaaaatcaaacaattcaatttggctgcccaggtgcacaatctagaatgttaaaccataagaagattgaagtgaaagatgcgagaactgaaggtgagatagtatcacaattgaatcaatggcctgtgcaaattaaacttgtctctccaaatgcatcatattttaacaatgctaatttacttgtagcagcagattgtacagcctatgcatatggagattttcataataagtttattagaaataaaattacattaataggatgtccaaaactagatgagggagattattcagaaaaactaacgacaattttgaagatgaatgatataaaaagtgttactgttgtaagaatggaagttccatgttgtggtggaatagaaaatgctgtgaaaaatgcattaaaggcaagtgataaaatgattccttggcaagtagtaactatttcgactaatggagaaattattgaataaaaatataaataaaataagggtatatttgcatatataaaaagttttatatgtagatatgccctataaatttataaaaatgattatttcagggtatacttaaattagaaatgggaatttatacagataagtaaaaaattatatattcattaaggtgaaatagaggatattattgctaatgtgtagaatactataatatcgagatatttaagggggagtatatatgaataaaaggaaagtgttaataccaatagacggaacagaaagaagtatgcattctttagaatttgtaaaagaaatatttcccgataaagattcaattgaaattattataatgaatgttaaagaattagtactgataaatgaaatgatagttgctgatgagataaaatttgcacaagaattgggtgaagaaatattacaagcggctaaagaaaaaatgaaagattataatacagaaacttattttacttttggatatccaggagatgaaataataaagaaagcaaatgaagaaaatataggagtaatagttatgactaaatctactaaaagaggtttaaatagaatgattgggtcagtaactactaatgttgtcaaacgtgctaaatgtattgtaatgatagtgcctaatgatttttcgattagtattaaataagcaagttaatcagtaggtttgaaaattagaattttataggctatcttaaaaattacattttaaggtagtctttatttttgaatatagaattttactatgtataatgatataataaagcgaaacttatttgttataatataagtatttatggaacattaagttaaagatttatattaaataataattttaaggtggaatttattttaacctaaattaatacatgcggttagttcataattttcagataagggatgagaattttgaattgatataaattatataaaaattattttgttatatttaaggagtaagaaatgagagcagtttatagaaatccaagagaattagcaacatgtttaaaggacattgtggatacatattatgatgatctaatttcatatgaaaagatggaagaaagaattatgaaaattgttaatgctaatagagaagctatatataaagaaaaaaatatgtcagttaagatagctaatgtcttaggagataaaagagtagatgtaattaataaagtagttgaaagtaaaactaagtcagaagtttaatgagttttgcggtttaggagtgaatttggaatgggtaagaaagtaatattaacaggagatagaccaacaggtaaattacatataggacactatataggttctttaaaaaatagagttgtacttcaagaatcaggcttatatgaaagttttataatgattgcagatcagcaggctttaacagacaatgcaagaaatcctgaaaagataaggaatagtttaacggaagttgcactggattatttagcagttggaattgatccaagcaaatcaaatatatttgtacaatcacagataccagaactaaatgaattaacaatgcattacttaaatcttgttactttatcaaggttagaaagaaatccaacagttaagcaagaaattaaacagaaaaattttgaaaatagtattccagcagggtttcttatttatccagtaagccaagcggctgatattacagcatttaaagcagacacagtaccagttggagaagatcaacttcctatgattgagcaaacaagggaaatcgttagaagtttcaactctatatatggagaagttctagttgagccagaagcagtacttccaagttctaatgcaggaagattacctggaacggatggaaaagctaaaatgagtaaatcaataggaaattgtatatatctatctgatgatgctgatacaattaagaaaaaagtaatgtcaatgtatacagatcctaatcatataagagtagaagatccagggcaagtagaaggaaatactgtgtttacttatctagatgtatttgcaactgataaaaatgctgttgaagaaatgaaagagcattataaacgtggtggtcttggtgatgtaaaagtaaaaaaatatttaaatgaaattttacaggctgaattggaaccaataagaaatagaagaattgagtttgaaaaagatatagatgcagtatataaaatgctaaaggatggtagcaacaaggctagagaagtggcagcaaatactcttagagaagttcgaggagcaataggtatagaatattttactgaaaaataataaagtaaattcattagagggggaattcaaaatgaaagctattggaatattaaattatccagtagaagatgtgttccatatttttataaaaaatgcaaagaaagatttttcggattttaacgaagaagatgcgacaggatgtaagattcaaaagagtataaatactggtagacctaatccagtagaatgtacggttgaaataactggatatgcgaaaaatgaaaaatatcaaattactacctcaactgattttacaacatgtgtatccacatataatttcaaagggcaaaaagatggcacaactaaattagtatttgaagaagaacagtcaacagataaattttttggatatatgtcattatggattcaaagatttatggctaggcgcgcctttaaggcaaaatacaataatattgtggaggctctcaataatgaattgaagacatatgctaataataaagaacgaagcaagcctaaaaataaataataaaaatacagggttgtaaaagcaatcctgtatttttattgtattgaaaaatattaaacccaattaccattgttaaaaattttaattttttcaccagctggtgtaataccagttatatttgtatctttagttcctatcataaaatcaacatgtatcaacgatacatttgaaccagatagtattgattcttctcttgtcattttttctccgttctttatgcaacaagggtatgaagaaccaagagctaaatggcatgaagcattttcgtcatataatgtattataaaaaattatatttgaatttgaaattggagaattatatggaactaaggcaacctcacctaaatatcttgaaccttcgtctgtattaagaagctcggttaaaatatctaatccagtttcagcagaacaagctacaactctaccatttttaaatgttaatgaaaaattgtttattaaatttccacaatagctcaaaggttttgaactaaaaacaattccgtttacgtcatccaatttaggggtagtataaacttcttctgtaggcatattggcaataaatttcagaccatcttgagtaatatcctcacccccacaccaaatatgatcttgaactaatcctatttttaaatcagttccaagagaatttgtaaaatgaagatatttaaatttataggaatttaattctaataccttatcatgaagaaggttagtgtgcttattccatgcatctataggatcagattctttaagtctcataacagtaaaaattgcatcccataatttttcgattgcttcacatgagttagattcactaaagactttttttgcccagttttcagttggaattgaaactatgcaccaagcatttttgttggaagtacatgcactatgatatttctctaaggctacacgtctacctttttggtatgccgatattttatcggaatctacatctttgaaaatatctggatcagatgcggaaatactcaaaaatgctgcattattttctacgtaatagtcatatttatctttttcaaattttggcgtaatagaaagaatttgttttgaagaattattaaatcgtatcttattgaatttttcatcattataatttataactacatcagaagcaccagctttataggcttcatctgcaagtaatcttgcaaagttactacactcaatagggctatttataactaaaagtccatctttttgtatatttacacctttgataatagcaagtttagcatatttagataaaagattatctaacaattatatcacctcattacatagtggattttaataacactggttaatttaaaatactttgaatttagaattacaatctataattaacattataacaatttttacaagctatctactatagtaaaataaagaatatacaaaataagaattattactaataattatggaaataatatgagataaattcattacacaacaagatacatgtatactttaagttatacaatatagtataatgagtttaaataatgacttgaagtagataataatatttctagttgagtaaatttttatgttaaatttcaggaggtttttaatgaaaaaattattgattttagactcaaattcacttatgaatagggctttttatgctttgcctcctcttacaaatagtgatggaataaatactaatgccatttatggttttataaatatgctacttaaaatgaaggatgaaattagtcctgatagtataattgctacttttgatttgaaagcaccaacttttagacataaagagtattctgattataaagcgggtaggaataagatgccgccagaacttgcggaacaatttccaattattaaagaactgtttaagttaatgggaattaagatatttgaagtagaaggctttgaggcagatgatttgattggaacagtatcaaaattcgctgaggacaataatacagaagtatttgtagttacaggagatcgtgatgctcttcaactagcatcagaaaaaactaaaattataattactaagaaaggtgtcagtgaaactgctgtttatgataaaaaaagctttatggatgaatttgaagtgactccagagcaatttatagatgtaaaaggattaatgggagataagtcagataatataccaggcgttccaggagtaggagaaaagactgcttttaagcttataaaggaatatggatctgttgaagaagtgcttaaaaatatagataaaatttctgggaaaaaacttaaggaaaatttagaaaataatgttgaacaagcaatattttctaagaaattagctacaattatgagagaagttccaatcgaattaaatttggaagatataaattctagcaataaagaaaatatattagaaattaagaagatgcttattaaacttgagatgaaatcaatactatctaaatttaatgatgatacagttcaagaagaatctaacattgaagtgagaaatattactacaattgaagatatgaaagcattattttcagagatgagaaatagaatttatatagattatactttaactgatgcatctaggtattctaaattaaaacttgaatacttaatgttcggggaagaaaataagggtactattatagatttcaaagacataagttctaaggatagtgaagaagctttaaaagttttgaaaaatcttatggaagatgataatgttaaaaaagttattcatgatggaaaaaactttgttacatttttaaataaaaatcaaattgaaataaagggatttgattttgatactgcgatagcagcttatttaattgattcatcaaagagtaaatacgaaattctagagcttgttaaccattatattggtgataatcctaacagtgaagacagcaatattaagggaattctttgcagttacttacctatggtttatgaaaaattaaaagaaaatcttcataaggaaaatatggatcaactttattatgaagtggagcatccattaatttatgtgctttcatctatggagagtattggatttaacataaatcaaggtatgttagatgagctacagattaagtttaaaaaagaaattgataagacacaaaaagaaatatatgaattagcggatgaggaatttaatattagttctcctaagcaactaggaaaaatattatttgaaaaattggatttaccagttattaagaaaacaaaaactggatattcaactaatcaagaagttctagagaagctaatgaataagcatgatataatacctaaaataatgtattataggcaaattacaaagataaattctacatatgtagaaggtttaaaaaatgtagttgatgaagatggtcgtattcattctaactttaatcaaactgtaactacaacgggaagactatctagcacagaacccaatttgcaaaatattcctataaagtatgaaatgggcagagagataagaaaggtatttataccaatggaagaaactgatatactggtttcatgtgactattcgcaaatagaattaagggtattggctcatattgctggagatgaaaatatgatagatgcatttgagcatcatagtgatattcatacaaaaacggcttcggaagtatttaaagttccagtaggggaggttacttctcttatgagaagtagagcaaaagcagttaattttggaatagtttatggaataagtgcatttagtcttgcagaagatttaaagatcacaaagaaagaagcagaagaatacatggctatatatttagaaagatatcctaagattaaagaatatctggaaaatgttgtggaagaagctaaagaaaagggatatgtattaacaattttaaatagaagaagatttatcccagagataaaatcttcaaataagatagttaaggctttaggtgatagattggcaatgaatgcaccaattcaaggaagtgcagctgatataataaagcttgcgatggtgaatgtttataataaattaaatgaaaaagaattaaaaagtgaattaatccttcaagtacacgatgaacttattttaaatgtaaaaaaagacgaatttgaagaagttaaaaatttagttgcttatgaaatggaaaatgcaattaagttaaaggtagcacttgatgtggatgttaattttggagatacatggtacgatgccaaataatgtattgtggaattaaaaaaaggtggtttttataaaatggttaaaattggtttaacaggtggaatcggcaccggaaaaagcactgtatcaaatattttaagtaaagaaggactaaaaataatagatgcagatgctatagctaaagaagtacttgaaaataatccaaagatattagaaatggttcgggcacaatttggagcaggtttctttgactggagaggtgaatttagaaggaaagaatttggaaaccacatattcagatttcctaaacaaagaatcaaatatgaaagtataattatgccctatattaaacaatcaattgaagaaaagataaaattgtatgaacaaaagaatgagaaaatagtaataatagatgctcctactttaattgaaaataatatgcatgaggaaatggattatattgtacttgtatatgctgataattcagttcaaattcaaagagttatgaatagagataaattaactaaagttgaaactgttagtagaataaattctcaaatgtctatggaagaaaagaaagagtttgcgaatattattattgacaataatactgatttaattgaattgcagaagcaagtttatgattttattgattttataaaactaatatgctaagtaaggagaatataatgaagtttctaagaaaaaccttttgtgcaatagtattcttagtagtaatcgtagcagcaattggcataggttcgagatatattataaaagaaaagttttttccttataagtaccagcagtatgttgatatgtacagttcacagtataatctagatccattgctagtactagcagttataaaaactgaaagtaaatttgatgatgatgcgcattcacataaaaatgctgtaggtctgatgcaaataacggttgatactggacaatgggcagcgaaagaaatgggatataatacattctctaaagaagacctatataatgaagaatataatattaaaatgggatgctggtatcttaggcgtttgaatgatacttttgataaagatatggatttaacaattgcggcatacaatgcaggaccaactaatgtacaatcgtggcttgataatagaaaatactcttcagatggaaaaagtgtagattatataccttttggagaaacaaaaaaatatgttgataaggtaaacacatattatcatatatatcaatatctttatgataaaaaggatgattattttgaggcagataaggtagttgatctgatgaaaagtttcctaaatgtacattttttaagttaattattagtctttgcctaataattaacttaaatattttatgaaaattacttgaattttaaataagaatagattatcattaaatgagtaatttatatttgcaggtgtggtggaatggcagacacgctatcttgagggggtagtgttcacatggacgtacgggttcaagtcccgtcacctgcaccaatttttaggtacggaagtcttataaataaaggacttccgttttttattacttatatatttgagtccattgtattaaaaagtagctttgttgagattgctattttagtaacttagcgaaggtcttagatataacacatatttagttatgaaaatggctaaatatgtgttattttttttaaaaacgtgtattagtatacataaaatattttttgttttaaaatcttacaattgtttataatctcattactatgattaattaaatctctaaaattataaatagtcggattaagaattgagaagttattaatcaaacttaagattaataatttgaaatcgaaaaagctgtagagggaatctcggaaaaaattcaagatggattatatcagtaaaggtagagataaatcttagtgaactattagtaatttagattttatagtccttagcgtaagcgctaagggcattttctttattttctaggatttattattgtaatgaaatctgtagatattgtgctcctttgtgggtataaattatggaaaatgctgattcaaaaggtcgcgttttaaatgagaataaaaaagaaaatatactcgactgacaaatttttctcacctacgttagaaaagacagaggcgtaaaaaatattataaatgaacagttaaaattagatttaaaaagggattggttgttaaataaaattatcatacatttcattttaattgaataggtaaatgtataatagttattttcaccaaaatggaaatgaagtttcaagtgtggaaaataattattgaaggaaaaaatgacttttggtcatttttatatgatataatttatacaaagaaatattttctgacaggagcattgaatatgaagaatataataaatattttcaaaagggatatgaagaatatatttactaactgggtggcagcgcttgttgtagtagttttaatgataataccatctttatattcattaataaatatagaggcatcctgggatccatattctaatacgaagggaatagaagttgcaattgttaatgaagataagggaacggtatacaaagaacatagtataaatttaggcgatgaattagttgataagcttaaggaaaatgatcaattaggatgggtatttgtagacaaagaaactgcaaaggatggcttaacaaatgaaaagtattatgcaatgattgaaataccacaagatttctccgaggatgttacaaccatagttaagaaagatgttacaaaacctaagctaatatatactgtcaatgagaagaaaaatgtcattgcatctaaaataactgatgcaggtgtaaaaagtgtcaaaactcaattagatgagaatataacaaagagtatatctgggataatgttcagactatgtgatgaggttggtatagatatacaaaacaatagatctgagcttagaaatataatagattcagtatataaattagatgataatatgccagaacttgagaaaatgctagatgaagcaattaatggaacaataagtgcttctgaattaatgataaaaaccaatgagcttataccaactgcagcagacactattgatgaaacttctgaatttttaaatgatacacaaagttttctaaatgagacacaaggagatttgcagaatgaatctccaaaagttaaagaagatcttattgaatgtgaaaatacactagatattataggtacagagcttaaaaatattgatgaaaatatatcaccagaagtagaaaaaaaggcattgttacagatattagatacgtctaaagcaattaggactagtactagagatgctaagtctagattgaagaatataaaaaaagctattgataagattagcgaaatagaaatccctaaaccttcaattgacaactcactacaaagctatgatgagataaaaaagcttcagcaaatttttgataaacaagcagatgtaattgaaaatcaaagagatttgttaaggcaggaaagtaggacaatttctaaaattatagataggttagatactatagataataatcttgataaattaattgatagaactaataaagatattgataaattaaatagtggagataaaatattggacacgcaggatcttacagatactagaaaagtattagatgatttgcataatttagtttctgatataacagataattatgattcggaaattgtaccaacaattaataaggggtttgactcaatgagcgagataattgatactgggttaaacttatcggctcaaggaaaaagaactttgccagatgttcaagagatgttgaatacatttaaaaatacagcagatttatctaatgatgaattaaaaaaattaaaagaaaagtttccagatataagagataatgtacatgaacttgcacagagactaaagaaaatagataacaagaaagatattgatgagttattagatatgataacaaatgattggaacgctcaaagtgattttctatctagccctgtagaaattcaggataatagattattcccatggcctaattatggatctacagtaacaccattttatacagtcctttgcttatggattggtggatatgtattatcagtcctaattggaacagagtcacattctatagaaaatgataaagaattaaacaagtacgagaagtattttggtagactaacattatttttattcataggaataggccaagctttagttgctagcttaggggcattgtttatactgcattcctattcagttcatccagtaatgttcgttttctattgtatatttataagtgttgtatttaattgcataatttacacagctgttagtctttttgggtacggaggaatagtcataggtgtggtattgcttgttatacaagttgctggaactagtggtaatttcccaatagaagttaatccgacaggatatcaaaagatatttccatttcttccatttacctatgcaataagtggagttagacaaattatggcaggagtaatatattcaatattatttaaagatagcattatattattgatgtttatgataggatcaattattattggagttttggctaaagaaccgataaatgcaaaaagaataaatattgttgaaaaattaaaagaaagttcaataatgagtagttaaaataatctatattgcaatattaggggaattaattatgaagaatatatttaagatatataaaagagatatcaataaaatacgtactaattgggtagcaagacttatgattatagtaatgataattattccatctatgtactcattgataaatataaaggcttcatgggacccttattccaatacagctggaattaagattgctattattaatgaggataaaggtactgtatttaaagacaagaatataaatttaggagaagatttagttgataaacttaaggaaaatgacaaattaggatgggtttttacagataaggaaaatgcggagcaaggtttgctgctagaaaagtattatgcaacaattgaaattccagaaaacttttctgaagacattacaacattgttggaaaaaaatattaataagccaaagttaatatatacagtaaatgaaaagaaaaatgcgattgctcctaaaatgacagattcaggtataaaaacagtaaaaaatgagttagatgaaaatgtaattaagacagtctcaggaatattgtttaggatatttaatgaaagaggagttgatatacaagacaatagacctaagcttagaaaaatagttgataacatatatgagttagatgataatgtgtcagaaatagaaacacttttagatgatgcaagtaatggaacagttgatttgaaaaatgtgttaactaaaactaatgatatgcttccaacaatatctaatgctattgattcatcaagtgattttttaaataatagtaaatcagttttagatgatactcaaggaaaactatcagacatttctccaacagtaaagcaggacttaataaaatcagaaaatgtacttgataattcaagtgtagaacttaaaaatctagatgagaatgtattaccagaagtatctaaaaaggtgttattaaatataagggattctgctattgcaacagaagaaacaattaataatattaaatataaacttagaaatataaagaaacttattgataaattaagcgatatagaaatcaaaataccttcatttggtgataatgttcccaatgttgattctataaaattaataacagacaaactagataaacaattaaattcagtaaaaaatatgcaagatgatttaaaagatataagtgaaataatttcagataatattgataagctagataccattgaagataaattacaaataatagctgataaatcggatgaagaagttaagaaaatagataatgagggattaaatgttcaaacacttaaggatattataaaagttgtagatgaagtacatagtttggtggcagatattacagacaactatgattcagaaattgtctcaggagtagaaaaaagtattaattcaactagaaatgttttagatgacagcttatctattattaatgaaggtagaaatacattaccagaagtagaaaacttgctaagtgtttcacaagatgctacaaatttaactaacgatgaattaactagtttaaaaagcaaattaccagacgctaaaaataagattcatgaattggcggataaaatcaaggatatggatgaagaagataaaattgatgaattattggacatgatgacaagtaattgggaaaatcaaagtgactttgtagcaagcccagttgaaatagaagataatagattatttccatggcctaattacggtacagctacgactccattttataccgtactttgtttatgggttgggggattgctggcttctgctttattatcgctggaagcacctaaatttgatgatggaacaaagattaaaccatatgaaatgtatttaggaaaactattactatttttgacagttggagtatgccaagcattagttgcaagtataggtagcataatcatgctaaatgtttatgcagttcatcctataatgtatatcttttatagtatatttgtaagtattatatttgtaattgttatatatactgcagcaagtatactagacgatgtagggaaagcagcaattgttataatattagtacttcagatggcgggagcaagtggtaattttccgattgaagttgcaccagtattttttcaaaaattgtttccttttttacctttcacatatgcaattagtggtatgaggcagattatggcgggaatagtgtattcaatattgattaaagatatagcagttttgtctatatatatgtttgcttcattaattgctggaatattattaaaaggatttatgaacagtattacagttaattttatggagaagttaaagaagagtggaatattgagacattaatagttgttaaaataaaattattattaattggaataaatagtcaacacaactgattgctggctatttttttctgtaaaaaattaattgtatacatttatttataaaagtaaggtggcaaaatagaagaaaatgatataataagtttatagtttcataaaatagggggaaaaatggaaaagtataaaagaatatcaaatgattttgttatgagtaaatctgcaatcatatatatttatatggcaagtatatttttatattttatattaaaatttattgttaatgatgctaatgtacatatacctttaatttttagaatttattacataaccctaagtataactttatttgtattattaaagcaagtgagaagattttacaagagatatgtttcgaagataataataatatttttctcactaatgatttttatatcagtgtttggatttataatgaaaatttatgatgcaaataatttaatggaaattaaaaattatataaatttaagcagagagagtatattactaatagaaacttttgctagttatgtattaactgaatattatttggaaagaagaaaattaaagatagaaagttatggaatattaattttaattattacatgcactttactgagtcatttttctaatttgactatactctttgtgaaaattatatatacggttattgagataccagcatttataaaaatagttatgaacttaaaaaaatcaaactacttaagggaacatggatggagcattataaaagtttacatatcctcaacggttctgatatttttaataaatatatatgcatttaatagtagccaatatatagaagatgcattaattgaagttatacattttgcaaactttacaatgctttggaattttattatatctaggttggttaaagatccatatagggccttatcaagttcattgaattataaaaatggggaattagatgaactaaatcatgaaatagaattagggaataccaagttggagagttcaataaatttattaaaaagcaaagagtatttatattcaacattatttaggttcatgccccatccaattataattctgaatgcagagaatgatagaatattatttgtgaataagcaatttctaaagatttcaggaatctcaaaaaaaagagaaataataaataaaaaaataagcaattatattgatttcgtaaataataatgcagaaaataaggattataatgcaatcctttatataggaaatcaaaaaaaatttataaaagcagaatttttgccttattatgaaaatttatcatggaagttgctattgattaaagatagaacttctaaagttcttgtggatgaaataaggaaagaagttgagaataaacaaattgaagaaagtattaggagagaatttctttcaaatataagtcatgatttgaaaacgccaataaatgtaatatattcggcaatgcaggtagaaaaaatatatgttcaaaaagaagattttgatattttaaagaaatataatgatatatccaaacaaaactgtatctctttaattaaattaaccaataatttaatagataattcaaagataaattcacattatttaacgccaagattagagaatatgaacatagttgaggtcatagaggacaatgtaatgtcattagtagaatatgtgaagttaaataatatagatttaatttttgatactaatactgaagagtgttacttggatattgatcgtgaattcatgtatagaataattctaaatttagtttctaatgctgtgaaatttaccaaagatggtggacaaatatgtgtggtggtaaatgaatttgatgataaggttaatatatctgtagaagataatggaattggaatagatgaagaatttatatatgaagcatttaatagatattcaattggaggaaattgtaatcctgaccgaaaaagtgggacaggcatagggctttttgtagtaaagcaattaattgaactacaaggtggaaaaatagaaataaagagaaatagtgatttagggacaactgtaagtattgaatttaggaaagggatatagagatgtataatagtttcttagtattggacaaaataaagataaaaattaggggaattagaaacatgcagaagtatgcatttttaacggtactaataattttatgctctattatttctgataatgttaatttttatttgctattaaataatataattgcaatatccatgatctttgcgtttatttatgtatatataataagaggtaagtttgtaggtaaaggttttgtagcaagatttaaaatgatatatttaatacttattatgatactagctataaatgttactgagataataatgttatttaaggatatttctaaaagttacttcatacttctttatagtatgcatgctactttagaatactgcataataaaaatagggcttgtggttaaaaataatgatagaaagagtcttataatatgtatatcagaaatactaatcattataatgcttgttattggcttcaatggagggaatgtaatacataatccttatgaagaatcactttttatatggtgcattactataagtgttttgttaagtataggtttgtgtatatctacagtacaagatactttatctaaaagaaagcaatttaccattgatgaatttagacaaataatattttatattttttctatattatttaattacttgggatttatatgtttttatatgggctacgttaaagtttctgaatttgtattaattgttaaatgtattactttatataaattttatgattacataataagtaaagtagtggatagttcattaaaagaacttaataataatataggaaatgcaactaaaaccaagaaagaacttaactctatattaaggaaaagaaactctatattaaatgaaataaatgtaatgatccaaaagagcggagataggaataatgaattaattgattctatttatggtggtgtatttctattttacctagatagacttcgacatataaataaaagaacattaaaaactttaaacataactaatgatgagatcttaggaatagaaataaatgattttataaaaatgtattttgatataacgcttgaagatgttaagagagcgggcaattatattccatgcataaaaatgaaacatactgatttcgaagttgaaatatttttggcttccatagatgaaataagcaagattctttacatacatgatataagtgaaattaaagaaaataaaaagatgagagaaattcttgaagaatatttgcaagaagatgaaataaaaaaagaatttttctccaatatttctcatgaattaaaaacgcctataaatcttatattttctgcattgcaggtcaatcaaatttactttaatgaaaataatttagatggagtaaataaaaatagaaagattataaaacaaaattgtttaaggcttataaggactattaataattttatagatgctaataaaatttcagagggctatctaattccaaatttaaaaatacataatatagttaacattgtagaagaggtttcgatggcttctaataagtacataaaattaataaataatactctgacatttgatgcacaggaagaagaaatctatgttaagtgtgataaggaaatgataacaagaattatgttgaatattctttctaattctgttaaatatggaaagcaaggtggaaaaataaatgtgagtgtggaactttacatggataataaagttgctataaaagttaaaaatgatggcttgaaaattgataaagaaaccattccatatatttttgataaatttactaaactgaataaaacttttaatagactaaaagaaggaagcggtttagggttatttttaactaaagccctagttgaacttcaagaaggaattatacggctcacatcaaataataagggaaatgaattcacaataattatgcctatggctcagcaatcgtatgaagataaatttaataatgaagattgggaaacaaatttattagaagaaaaggtagacatagagttttcggatatatatattgagtagaattaacttaatatgaaatgaaaaaagtaagtagatatgaatttaataaatctataggtactaaaaataattacaatttgaataaatagttttattaattaatcatagttttacataaataaacatatattaaattagttatgttaaactaattacttaaatttgaggtgtataatttatgtcagaaaagtcagggaataaaaagaggataagaattattccattgtttgtatcaataattattccacttttaataggggggctttcaacattattggttcctaatatgaggtcaatatatgaaagcttaattaggccacctttttcaccacctgcaatggtttttccgattgtgtggactatactttatataattatgggaatatgctcatataaagtatatattttaaaatatgagaatatagatgtaagctctgcgatatttgtttacgccatacaactattattaaattttttatggactataattttctttgggtttaagctttatgcgttagcatttttggaactcattattttaattatctttgtaattttaactataaagaggttttatgaaaagattgggaaaaaggcatttctattaattccttatttggtttggttagtatatgcaggagtgttgaatttttttatttggatgttaaatgaaatgtaagttgcttatatttcatgtaattaatatttttaagatggttgctaagattaatatctaggtaatcatcttttttatttactgctatatatttattgcatgattttgaaaggacagatgtgtaaaaaacttcgggattcacagttgcctgtgattttattctgatttttaatattatttatgttttagtttataaaaaaatatatctattttgccatttaaagaatattaatattatatactatcaatttagggaggggtctgctttgaaatattttaattaagtatataatagattcaaagtgggataagatatgaagaaagaattaactccaaatgaaattattttttgtacttcgtgtacaggtaacattaaaaaaagtaatattaatagagtacccgaatttacatctactttaaataaaattaaaaagagcttgagtgttgaaaaagaaggatacaatatatattacgtagactcattttcaaaagaaaaactagagaatttaatagagtgtgttgaaaatatatatgaaaaacttcctgctccaaaagatatttgctatgtaacctcacaagaacaactaaatcctactgcattgtttttgccaaacggcaaaggaaatatattaaaagaaatgattgatgatataaaagagaaatactttgaatgcatagttgagttttatagcagttcttcagatgaagaaaaggaagatattattgaagaaataagtgaaaaaaggaataattatataacaaaacttatggattcagcaaaaaataagaattttgatgttaaagcaactagcggaggatttgtgtttattcctttgaaagatgaagggaatgagatgactcaaaatgaatatgatagtctcgaaagtaacactcaggaaactatcgaaaaacaagcatcaaaattaaaaaaagaagcagaagaaattctagagacattaaaggatattgaaataaaatcgattaagaaacttaaaagtatttataaagattttataaaaaagaatatgcagagttataaggatgatctattattgcaatttatttctcaagatgatgtttataaatatcttcttcaaatgtatgatgatatagaagaaagggtagttgaatgctacactatcaatttggaggatgatgaagagtatttaaaagatactttctctaattataatgtgaatgtaattgttgataattccagcatagatcatccgagagttatctatgaggaagatcctactattggaaacttaattggtactattgaatatagaaacaataatggggggtatagtacagatatatcattgatttctgctggtagcttgttaaaggctaatgaaggatgtcttatactaagattaagttcgctaataagcagtggagtaagttactactatctaaaaaaatcattaattcatggtaaaataaactataattatactaagagctatttagaaatgatatctatcgcaggattaaagccagagtcaattcctattaatttgaaggtaattttaataggcgactatgagagttttcagatattatatgataatgatgaggattttaaacaaatattcccaatcaggatagaagcggatactgaattgaaatataatgatattactaaaaattctattgaaggattaataaaagaaaaggtaaaaaaagataacttgttgaatataacggatgatgctcttaaggaaatgattaaattccttgcgagggtcgcaggtcaaagaaataaaatatctatagatgattattatataaataaattacttcatctatccaataataatgcaaaagaagataaaagaaaaaatatagaaaagcaagatataattgatatagcatatgaagatgaaaagattttagaagatataatggataattataaaagtaaaaaaatattgataacagtaaacggaagaaaaacaggaataattaatgggctttctgtagttggaaatggatcttatagttttggtaagcctatgaggataacatgtttatcaaatataggagatggaagaataatcgatgtgcataaagaatgcaagatgagtggaaatatccatgaaaaatcgattgggatattgcgaggactattaagtaatttaataagtccttatgaaaaattaccagtagattttcaattaagttttgaacagacttatggaatgcttgaaggagatagtgcttctgtggcagagataatctgtattctatcagctttaagtaagaggccaataagacaaaatattgctgtcactggatctataaatcagtttggagaaattcaggcaattggtggggtcaacgaaaaaatcgaaggcttccatagagtttgcggcattattgataaaacagatggaaagggtgttttaattccaagtacaaatgctgatgaattaatattaagatatgaagttgaagatgatattagaaatggaaagtttcatatatatactatggaaactttagaggatgctattgaagtattaatacttgatgaaggagaaccagtaaaaagtttctttaaggaaatagaaaatgaaattttaaaatataagggtggaaaaaagaaaaagtaattattggattaactaataagttaaatgtttaagttatatatcacaactaagatatgaacttattcatatagctcgccgaaataaggattatgccgttgttccagtttctaaggaaattatgatggatgattctaatttttagttgggatatatttcatagtataaatctaacttatagtttggttatctataagaaaataaaatagaagatgatcttatgatatatatttatatgagtatatcgggattatcttctattttttatgcgttaaataaaagcgatagattcatttaatatttgataattatgtagtttagttaattatcggtatctttattttatatatcgttaatatatgtgatatagtcagataattaagatcatgagttataataaatagaaaaaaatgtaataaatagtttgacgttgaataaaatagtatgttaaaatatggtaaaaggtgaaatgagggaaaagaggaggtgaacgtagaatatcttaaaacttaaatatataagtttaaaactacattgtgagatattcttaattaatatgtatttaaaatttgagaaacaagaaaatattctaataactactcttagtggtgaactagatcataatagtgcagaggaagttagagtgaaaattgatgataggatagatagagataatatagaaaaagttattttaaatttttcaggagttacttttatggatagttcaggaattggagctgtcttgggtagatataaaaaactatcgaacaaaggggggatgctttgtattgcagaacctaataagaatgttaatagaatttttgaactggccggattgtacaagttaattaaaaattataatactgtagatgaagcagtaaggtgcatttagatggaggggttatcatgtctgacaataaaatgagcatagaatttgtaagcaaatctcaaaatgaagcttttgcaagagttgcagttgcagcttttgttgctcaattagatccaacaattgatgaaataaatgatgtaaaaacagcagtgtctgaggcagttactaattctataatacatggatatgaaaatagagaagatggattagttagaattgaagcagaaattaatgaagatcaagtaactatagcgattattgataaaggaattggaattgataacatagagcaagctatggagccattatatacatcaagaccggatttggaaagatctggtatggggtttactgtaatggagacatttatggatgcgttagaggttgacagtgaaaaaggtaatggtacaaaggtggtaattaagaagaaatttaacgtggtaagttaggtgaaataagatggaaaaagaggatttaaaacgagaggattataattatgataaaaatccaaagctattagctctagcaagaagtggcgatactgatgctatgaataaattaatagaaatgaatttgccattggtgtcatctataagtaagaaatttctaaatagaggatatgattatgaagatatatttcaaataggatctattgggttagttaaagctattaataatttcgacttaaattataatgttaagttctctacttatgcagttcctatgattataggagaaataaaaagatttttaagagatgatggaatgataaaagtaagtcgtaatgttaaaagtcttgctagaaagatacattttcagaaagagattttaacaaagaagcttaaaagatcaccaactatagaagaacttgcagaatatgcaaatgttgataaggaagagattttatttgccattgaatcttctaatagcttacaatatttatatgatacaatacatcaggatgacggagctccagttcttttaatagataaactaagtgagaaaagtgcagatgatgaaaatcttattgagaagatagctcttaaagaagcattaaatagtttagataataaagctaagcagattataatgttacgttattttaaagataaaacacaagttcaagtagctaaaatgttaggaataagtcaagtgcaggtatcaagaattgaaaagaaggttttagctgaaatgaggaaaaagttagaagaataaaatttgctgatcatacattggtaagaaaaatgataaacataaaaaagagtcattatggaatatatatttgtataattttttattaaattaggacaaatatatattctattttttttataaatatatgccaaaaaataacacgattaatcttaataattttgcaaatgatagatatacaggtaaaaaaggagagtgatcatcttgactaataataaagaagtaaatgaagaaagaataaagcaaaaatataatgctatggctaatgaagccataccaaaatctaagatacttaaggattgtttaaaagcgtttttagttggaggattgatatgcgatgtaggtcaattgatttacaatattgcagcaggatttggaattgcagaagaacaaataatgaatatggttcctattataatggtatttttaggagctttgttaacaggtactggagtatatgctaaattggctaattttggtggagcgggtactgttgttccgataactgggttctctaatgctgtagtttctccagcaatagagtttaaaaaggaaggatttatatttggagttgcagccaagatgtttacaattgcaggaccagtattggtatatggtattggtacatcagtaataataggaataatttattatataatttcaataatttaaattaaaaaaggaattggaattttaagatggggatatgtatttatttgataaataatcgagttgcttttaattcaaaaatgtagaggagtgattaatttgcaaatgaaaaataaaaagataggaaatcaaactgtaaaattagataatccacccaaaataatatcaacacattctattgtaggccctaaagaggggcaagggccactaagtgagtactttgatgaggtattaaatgatgacactttaggaaaggaaagttttgaaaaagccgaaagcgagatgatgtttacggctatatcacaagctttaaaaaaagggaaccttaaagaaacagatatagattatttattttcaggagatctattaaaccaaattatttcatcaagctttgcagctagagaatttagcattccattctttggattatacggtgcttgttctactatgtcagaatctttgagtttagcgtcaataattatggatggaggatttgctaaatatgtagttgcagctacatcatcacattttagttcagccgaaaggcagtttagatttccgcttgaatatggatctcagagaccagccacagctcagtggacagtaacagggtcaggagcagtagttttaggacatgagggaaattatcctgaaataacatatgtgacaacaggaaaagttaaagattatgggcaaaaagatgctaataatatgggagcagctatggcaccagcagctgctgatactattgtaaatcattttaaggatacaggaagaaaacctgaagattatgatgttatagctacaggagatttaggtgtaataggcagagaacttacggataaattaattgaagattttgggtataatattagaaaacaacatatagattgtggcgaagttatatttgataatgaaaagcagaatacattgtcaggtggaagcggatgcggatgttcagcagttgtttttacaggttacttatataaaagacttatgaaaaaggaaattaaaaaggtattgttagtttctacaggtgcacttatgagcactacgtcttctcttcaaggtgagacaattccaggaatagcacatgcagttgctattgaaatgaattcaaattaaggaagaaaaaaattataaataaacgagatataagcttataaaaatctattgcttgaaaggaatgaaaattgaatgaattatataagtgcattcatagttggcggcattatttgcgttataggtcaaatattaatagacgttacaaaattaactccaggaagaatcttagtagtgtttgttgtgcttggagctatagtaggtgcttttggatggtatgataaattggtttctattggcggagcgggagctacagttccgttaccaagcttcggaaatgcattagctaaagctacgataaaagaagtaaatgaaacaggattaataggagctttcacaggaggaattaaaggagctgcagcgggaattacagcatcaatattctttgggtatcttatggcactaatttttaatccaaaaacaaagaaataaatgaatttaatatgaagaaataattgagcccaatgcagattatatagtataaatgcctttaataaaattaacttttataaatatgtatcgaaaatatatataagatattaaagttttgccttttaatgtctttgaacgtataattatactataaatgaatgtagatatataaaaatgagaaatatagtataataaagaagttattaatgaagtaattagaatggtggggtttttttggaaaaatactgcaataactcttgggctcaaatagttgaattactaaatagtaatgttcaaaatggacttagtgagaatgattgtgaagcattaaggttaaaatatgggaccaataagattgatttaccaagtggaaataaaatttataaacatatactaaatgctttaaagcaaaaatctataattataaatttgataattacaataattttatttgtatttgaacactatttatttggtataataacagccttgatattattattaaatttaattttaatagtaatgcatactataaaaagagataaagagataggagctctagaaaggttgaattctgcagatacagtagttattagagatggggcccagaaaattataaaatctgaagaattagtaatgggtgatatagtaaaaattaataaagactctgttattccagcagatataagaataataagtgctaatgaaattaaagttgacgaaaagagtataacaggagaagccttttataaggagaaatttgaaagtaaaataataggaaatatattttctcttacagatatgaaaaatatattgtttaaagggtctataataaaatcaggtagtggactaggtatagtgatatctactggtaattcgactcaattaggtagaatgcttaccatgcttacgtatgcaagtaatagaaaacataattttgggacaatgatatctaaacttttagaaagatatttattaatttatttcctaggaattataattataggatcatattttgtatatacaggacaagatgcaaacaaaaattacatatccacagctttatttgcccttggttgttttccagttactataatcgcgaaattagtttttaataatataattaaaagctttaggaatgaaaatatagaaataataaatttttcagtatttaatttaattaaagatgttaatattttatttttagataaagttggtgcaataagcaaaaaagaaatgatagtcaaaaaactatttattaatgataatttgatatcgactgaagatccttatgtaaaggagacaacttttgataggatagttgagatatcattaatatgtaataacgctatttataatccaagtgatgatagtggaaaaggtgagttagatgagcttgctttcttgagttatgctgctagaaaaaaaatttataaagcagctatagatagtaggaattctaaaattttagatatacctatggattctgataagagattctctacagttgtaagtaaatttaataacagatatagagctaatactagaggaaacgtagatgatgttttagagcaatgtacacatgtcatgatagaaggtattgagaaagagattacggatgaatacaaagcaaaaataaagggagttgatatgaatttatctatagaagggttaataacagaaggttttgcgtatagaaactttacttacgaaccatctaaatctgaaaatatagaaagtaatatggtctttgttggaataattggattggaaaatccacttgaagagaatctcgaaaatacaataaatcgaattaaagataaagcaatagtaccaatattatttacagaagaaagtaaattaagtgctataacaaatgcaaaaatggctaatataataaagaataataatcaggtagtagcaggaatagaactggattctttaaaccatcaagaattaaaggatttgctttgtagagtaagggttttttgcagagtaaatccagaaattaaatcaaagattgtttcattatttataaaagatggccataaagttgcaaccactggtgaaacgttaggagatcttccagcactcaacctatcaaatgtaggaataggtaaaggaaaagcatctacaattgtaaaaaaggtatcagatgtatatattaaagaaaattatctagatggattctttaaaataagagatttttctagagtatttgatagaaatatagatagaggattcaaaatgtatttcatggctttattttcagaacttataactttaatgggaagtattataatgggacaaactgaaagtttagattttgggaatgtggtagcaataaatggagttttattcatcccattatcattaataatattacttaaaaaaggtcgagatattactagaaatgaaatgatagttagatcatttgttctaagcataattacaatggtttcaatttacaaacttggtgataaggaagcagctatagtgacattagctatattatcaattggaattttattatttacattatttaatagcagtatttctataagaaagttttctaacgaattgattatgcctgttatatcattgttagtaattattatcgccgtaattagtatgattctaattaatggagtattaattacagatataataggaatagagatagcagcatcaataatatttttattaatctttgaaattttagctagaaagtggcaaaactcattaatgaggtgagtttatgttttctaaaaaaataggagatgtaggaaatccactaatatacatatttttgacgcttgcaattagttgtattttctatggaatgaatagggaatttagggggcttacaatattcattgtagccttcttttttatatgcatattttattattgtggtttcagtttctttgctattatgattatcttttttgttgttggaattttaattaattgttcctattataaaattccaagcaaaatagacggagaagtaaggataataaaaataagcaattatagtgttataggaagctatgaaggcaagagtattacgataacaactaataataagaatttaagcgtaggtgaaaaatataaaattataggaaaagttgatgatatacaagatagatataatgggatagttggggaagtagagcctaaagtattgtataagattaatggggatttgataacaaagctttatgagattaaaagaaatatatatttgaggttaaaagaaaatctaggaacaagaaaagcggggctaatatcatcaattgcttttggctattgtgactatttagattttgaagacaaagatgatatgaaaaactttggaatcatacatagcataagcgtttcagggttacatgtagctatagtatatggttttataaggatttttgttggaagaaatttgggcattttgacgactatgatatatgtcttatttacaggactcaattactcgagtataaggtcttttttaatgcttgcatgtgtagaaggtggacgtattttaaaaagaaataataattcaatttctgctttgtgtttctctgcgacatttttggttctttatgaaccttatagtatttttaatatatcttttcacttatcttatttagctactttgggaatagcaatgtttaataagagcttcaataatgtattatataaattgaacattaaattaagagaagcattaagtttaacattaagcgctcagatatttacgttaccatatctaatcttaatttttagggatttttcagcaaattttattattggaaatttaattttggctccatttgtagatcttatggttattacaggaaatgcattggtattgacatatacttatcctcaattatttgatttttgcagttatataaacttgaaaataataaatatgtttgattacattctaaactatatggagaacttttcattgccaatgttttatggaaatgaaaatgtagttttcttctatctatttttaatgtttagtgcttattttgtgaaaaagggatataaaaagtttgtttatattcctcttatagctatttttataattacaattcaaatatatagtccaattccaagcataaggtattataaagaaggtgctattttggtttcttataaaggtgatagaatactaatatctaataaaaatcaaattgatataaataggctttctaaatcagcacttgcaacaaaatattttagacagagaagtacaattgctatgaatggaatttgtaaaataagtttcaaaggaaaagattacgttttagatactggtactaaaaaatatctattaaaagtaacaagtgataaaactcaatatgaagagtatgatataataaattttaatgataggattactaataacatatttataatagacggaagggtaatataggtttatagatttatattagaagcacattttatacgaaaggaaaattaaagtgattaattacgaagtttatgagcaagaaatcgaaaaaggaaatataaaaaatgggtatatattttgtgggttggatgaagaatttattaaagatggaataaacataattattaagaaaaatgtagctgaagaatttagggagctcaacttaatacggatagatggaatgaatacaagttttgattctatcatgaatgcgtgtgaaacaatgccattcatgggagaaaaaaaagttgtagttgtttatagggcaaattttttacaggataaaactgattcgtcaggaagtaaaatatataatgatcttaagaattatatatcaaatttacctccatatacagtattaataatgtattatttattgaatgataagagagatagaccaaataaaaataaaaaattagctactatgggtaaatccttaactgtagtatattgtgataaattaaaaagggacaaatatttaaagaaagtatcagaagtttttaaagaaaaaggaaagcaaattgggagaactgagttatcatatttctgcgagaaagtatacaataattttgatattataaaaagagaagctgacaagcttatagcgtactgcaatgaaagagaaataaaaaaagaggatattgatatacttatttcaaattcaagtgaggatgatacttttgatttagttgaattaatagctacaaaaaagattgataaagctatagatacgatgaaggaaattttatataaatcagatcagcatatgctgataataagtgcaattcaaaagcatttcttgagattatatgagataaagataaaacttagcaatggaaaaaaagtagatgatttcatgttagactatagattaccacagtttgtttgtgaaaaattgataatgcagacaaataaatttactgaaaagcaactgtcagagttaattaagctttgcgttaatacagaaacaaagttaaagtcaactggaatagataagaatatggaaatggaatttcttttaataaacacgcttacagttaaaaaataatatttattaataatataaattcctaaagaataaaaaataacccatctacttagatgggttttaagattatgccatagagtttaacttagcagctaatcttgatttctttctagcagccatatttttatgaacaactcccttagtagcagccatatctaatgacttaacaactgatgtaaataaagctttagcttcttcattattcttagcttctatagcagcttcaaatttctttatagtagtctttaaagcagacttaatcattctgttctttaaagtcttagtttcagtaactttaattctcttttttgctgattttatatttgccattcttaattcacccccttaaatttttatagggtctctgcagtttttggggaaatctgcgtacgagttcatattcaacaaaccttattatagcatcagaagttatgtaattcaagtattaaattcaaagaaaaaggaaaaataagactgaataaatttataaagaggtgttgatatgataaatgtaagaacggatttagtacttgaagcgagagaaatttataaggaaaatcacaaggatgaagtagatatagatggaatagaagttatagaagaaagtgatgatgatattaaggtaactacggtaaaggtaaaaaatgatgaaggtgccaaaaaaattggaaagccaaagggaaattatataactataggaatgccagattttacagcatatgatggcgaaactatggatagagtttcacaagtggtatcagagattttacaaagattaattaaaattgatacggataaaacagtattagttgtagggcttggaaattggcaagttacaccagatgctttaggtccgaaagtgacagaaaagattatggtaactagacatttgcaaacagttatgcctgaagcaattgatgagtctgttagacctgtctgttcagtagcgcccggagtacttggagtcacaggaatagaaactgtggaaataattaaaggtgttgtagaaaaaattaaaccagacttagtaatatgtatagatgctctagctgcaagaaaagttgaaagagtgaacacaacaattcaaattggagatactggaatatccccaggtgcaggagtaggtaataatagaaaacaaataaatgaggaaaatttaggagttaaggttattgcagtaggtattccaacagttgtagatgcaactacaattgctaatgatactatagactctgtaatagattcattaataaataattcatcaagtggaaatgagttttataaaatgttaaaatctctcgataaaaatgagaaggaaagactcattaaggaagtgatgtcatcaaaggcaagtatggatatgatagttacacctaaggacattgatttaatggttaattctttatcaagaataatagctaatgggataaacatggcagttcaacctaatatggatatggatgagattaataagtttatgggttgattatcaatagcatattttttgaattttagaataaaaataagaataaggaaaaaggtctcaaagtaatttgaattattttgagatctttttattttagattaattataaatgtatcttttaatctattctaatttttaaataaatggaatgatatttattagaataattatgtaaattcgttaatataaatataaaaaagggcaagggggggattaccgtgatatatatgagcagaagaggaaaaaaaggtgaaattaataaaaggataaaagcaaaacctaacattaatataggcttaataatcctcattttaattataggtgtatttttcataaggttaggtaatgttttaaaaaataacaaagaaagaggagcatttgcctatgttcaattattaaatttaggaatgccgataatagaatcccaagtttatgatgaaggaacctatgctgaaaataaactttcattaaagaatgtttgttttcaagtattaggattaaataatcttagttataaaggaataattcaaaatgaacttagtttctttggagatggagaaagttctagcaatactgaaactaattttagttttaatccgtttcaaataagtgaggacagtatctcaaaagtacaagtaaatactgatagtaagaataccccgatatatgatcctagtctaaaaaagacactagataaatctaagccagaagtattaatatatcatagtcatactacagaaaattataatgcatcagagccagatagtttaaatgaagatactaatgtagttggggtaggtgatgttcttgctaatgaattagaagagaattatgggatttcagttatacatgataaaaccaataattgtatttcttataatgatagttatacaagatctggagaagtggttgataagtatttaaaacaatatggcgattttaaaatggttatagatctgcatagagattctgtagaagataaagctgcgacaacaacagaagttgatggaatgagcgcatctaaaataatgtttgtaaatgctgaaaatagtacgagatatcctaaaaataaagaacttacagagaaagtatttaataaaacagctgaattattcccgggattgcctataaaaatattgacatatcatagagggaaaaatgcatttaatcaaagtaaaagcgatggatgtttactttttgaaataggatctcatactaatacaccagacgagtcaaaagttacggcagaatgtatggctagagtgattgcagaagttttgaataagaaataagtataaagttatatggaaaaggtttggaagttatattgagtgcatatgaaaaattagataacatgcaagtgtggttttaagcactaagtatttaaatagatattttaagttgagatttaagcgtaatcttgatgataaaatttaagggaaagattaggaatctaaaattagaatttagagccctagtcttttctttattttaatttattaatatataatattgagataattagttagtagattgcttgactgagaaagttgggattgaataatagttttgctatatggaaacaatctaaataaaaatcaaaaaataaataaaaaagggtgtttcaacattgaagaaaattattaaaagtagcattttaagaagaatatcaccgatgatttttatagtatttattatttttcttggaataattaaaatagatatgattaatactaaggcattatctcctcttggaaatactaatgaaaattataaacttgtaagcaatgaatttggagaagatttctcgaattttattaaggataattcatttcttaaaatttataaggaatctgaaaaagatgttttagttaagataggaagcaatgattttaggataaataatcaatcttcttttattaaaaaaatagaggatataattgaaagaataaaaccataatattagttaaaatatttagttaattttaaaatatatataaggcatattagacatagagcattgagggaaagttttgatagcctttctttatggatgtatgttataatttagctgatttaattataacgggggtgaaagtactgttttttgttaagaataacagttatgcgtatgaaaagtgaaagacaaaaacatatcagaaatttttcaattgtagcacatattgatcatggtaaatcaacccttgcggatagattacttgaaactacaggaaccttaactaaaagggaaatggaagaacaagttctagataatatggagatagaaaaagaaagaggaattacaataaagtctcaagcagcgaggcttgtatatagaagagacgatggtgaggaatacattcttaatttaattgacactccaggacatgtagattttaattatgaagtttcaagaagtttagcagcttgcgaaggagcaatattagttgttgatgcaacacaaggtattcaagctcaaactttagctaattgctatttagcgttagataatgatttggaaattgcaccagtaataaataaagttgatctgccatctgcaagaccagatgaagttaagaaagaaattgaagatgtaataggaattccagcagaagaagctccaactatatctgctaaaacagggcttaatataggggatgtattagagtgtgttgttaatactataccttcacctgatggagacgaagaagctcctttaaaagcattaatttttgattcctactacgatagctataagggcgttgtatgtataattagagtaatagacggaagagtaaagattggaactaaaattaaattaatggctactaataaagtttatgacgttactgaagttggagtgtttactccaggagtacttccaatcagtgagttaagtgctggtgatgttggatatgtaacagcatccataaaaaatgttagagacgcaagagttggggatactataactgaagctaataggccaacagaaaaagcacttccaggttataaacctgctataccaatggtttattcaggaatatatccagttgacggggcaaagtatgatgaattaagagaagctcttgaaaagctacaaataaatgatgcggcattaagttttgagccagaaacatctattgcattaggttttggatttagatgtggattcttaggattattacatatggaaataattcaagaaagagttgaaagagaatttaatttagatataattactactgcaccatctgttatatataaagtaatcaaaactgatggggaaatattagaaataacaaatccgactaacctaccacctttgacagaagtggattatatggaggagccagtagttaaggcgtcaataataaccccaaaagactatgttggagcagttatggagctgtgtcaagatagaagaggtatatacatagatatgcaatacatagaagaaaccagagctgttgtaaattatgatataccactgaacgaaattatatatgatttctttgatacattaaaatctagaactagaggatatgcttctttagactatgaatttaaaggatatattagaactaaattagttaagctagatatattattaaatggagatgtagttgatgcattatcaatgatagttccagatgagagagcttaccataaaggaagaggaatagctgaaaagctgaaagaaattattccaagacaattatttgaaattccaattcaagcagcagtaggatctaaaattatagcaagggaaactgtaaaagctatgagaaaagatgtattagctaaatgttatggtggagatatctcaagaaagaagaagctgcttgaaaagcaaaaagaaggaaagaagagaatgagacaggtcggatctgttgaagttccacaagaagcattcatggccgtattaaaggtagattagttagtataaataatataaaatagaatactttatacaagtaaattataattacttaaaaagtaattataaaaaactagctaatgtatgaaataaaaatatattatttttaaggaattatttgtataatattaattagtattatacaaataattattttaatgccggtttgggaggggtttgaatgtttttaaatgagttaaagaaaaatgaaggaattgcatttatgcaattggttaaaagccttgcagattcagacaatgtttttgcgaaagaagaaaaaaatctttacaatgactatctaaaagagctaaatataaatgaaagtgaaatatcagaatcagatctaagttccgtatgtgaagctctaaaaagttcgtctaatagatgtaagaatattatttattttgaactaataggccttgctcttattgatggagaatataatgaagaagaagttgaacttttagaaaagctaggtgaaacgttgggtataacacgtagcaagagaatagcatttgctaattatttttacaattttgtagatgtatatggtttttcagttgtagatgcagaaagtaaaattgccttattaaaagaacaggcggaaaaattattagcatagatagttttggatatgaaaaaagcatgatgtatattatctaagaataaataataaagaatgaatgataaaagtgagaatatctattgaaatttaaattaaaggtgaacacaccttataagtttaaatgaagggtaaaggctcctctagttattcattctttatttttgttttattaagaaaaatatttaataatatattggaggaaaaattaatgagggacatatccttatatatacatattcctttttgtaaacagaaatgtttttattgcgattttccatcttattcaggaaaagaagaattaatgaacgaatatatagaagcgttaagcagtgaaattttacaaaaaggaaaagaatacagaataagtagtatatttattggaggaggaacgccatcctacttgaatgactcaagtctagaaaaactactatgtactttaaataaattggatttaaaggataatttggagtttacagtagaatgtaatccaggtacattaaatgaaaaaaatctaaatattatgaaagaacataatgttaataggattagcatgggattacaatcaacaaaaaactctttattaaaagatattggaagaatacatagctatgaagaatttgaagaaaattattttcttgctagaaagttagggttcaataatataaatgcagacttgatgtttgggttacctaatcaaactattgaagattgggaatgttctttgaaaaaagtagcagaacttgaactagatcacatatctgcatatagcttgattatagaagaaggaactcggttttataatttatatgaagaagataagttgaatttacctgaagaggataaagaacgaattatgtatttaaccactaaaggcatattgaacgggtatggatatcatcaatatgaaatatctaattattcaaaaaagaacaaagagtgctttcataataaagtttattggaaatgcgatgaatacctgggattaggcgtatcggctagttcgtttatagagaaaaaaagaattaaaaatatagacaatattcaggactatattaaaagaataaataataaagaaagcgtaattcaagaaattcacataaatgatattaaagatgatatggaagaatttttatttatggggcttaggatgattaaagggataaaattagaggaatttaaagagcgatttaataaagatatatatgaagtgtatggagaaattattgaaaaaaatattaaaaaaggattattaattcataattcgggaaatctatatctaacttcgcatgggatagaaatatccaactatgtaatgagcgatttcattttatcttaatggattctctaatgaaaagtttaaagaaagattaagtgcaattataaaattatattgtatagagaaatagagaaaataggagatataaggagttaagttgataaaattgctttattattaacgttaggtagctataataaatataaatagaattgacaaaaaacatcataaataatatattaaaaacatagtcattagcactcgaggttaatgagtgctaacaaaaagaggtgaggttatgagtattgatgacagaaaaataagaatacttcaagctattatcaatgactatattcgaacaggagatcctgtaggatcaagaactattgctaaaaactataatttaggtattgggtccgcaacaataaggaatgagatggctgaccttgaagatatgggatacttagaacaacctcatgcttctgcaggaagaattccttctagtaagggatatagattatatgttgatcagcttatggataatcagatgctaacagttgaagaagatctaagaataaaacaatatataatcgattcggcaatgcttgaagtagataaaatagttaagcaaactagcgccttattgtcagaacttactaaattaacttgtgtaattgagacaccatcagtaaaaaggagctttataaagtcaattcagctaattaaagttgatgatcataatttagtatcagttttcttaacagatactggtgttataaagaatcatataatgaagctaaataatagagttcctgaagttgaaactttaacacgaataaatgaagttataaacaatagattggtaaatctttctatacaagaaattaatttagaagtaattaataacttaaaaaaggatctaggagcctatgaagaaatatttaatgctttattgcctattttatatgagacactaaacgcagcggattctacagaagtattcatggagggaactaccaacatatttaattatcctgaatataacgatattgataaagcaaaagaaatgttatcgcttttgaatgataaagaagctttgatggagctgtttaatcctcaagacaatataacagtcagtataggggatgaaaactacaagccacaagctagagattgtagtataatatctgctgaatattcctttaaggataggcctattgggaaaattggattaatcggacctagaaggattaattactcaaaggtaatcacgattatgtcagaagttataaaagagctcaataatatattgagcaatccaaaatagatgttagatttgaagagaagaggtgtgtgttagatacatggaagaaaatagagatgttaaaaatgaagaactagaaaaagaagaaattgcagatgaagtaacagaaaaggataatgagactcaagaaagtaatgatgtagcagaaacaaatgaagctagcaaagaggcttcagaaaatatagaagctgcggaggaagatcaagaagatttagtaaaaaatcaagaagaggaaaataagaagttgagagaagaattagatgcgacaaaagatagacttttaagattaacagctgaatatgataactatagaaaaagaacagctaaagaaaaagaaggaatatatagcgatgcatatgtagatgtattaaaagagattgttcctattcttgacaatttagaaagagctgttgcagctgatggtagtattgaagacttgaaaaaaggaattgaaatgacaataaagggatgcaaagattcatttgcaaaacttggtgttgaagaaatagatgctactggagaatttgatcctaatcttcataatgcagtaatgcatatagaagatgaagaattaggtaaaaatgtagtagcagaagtattccaaaagggatataagaaagatgataagataataagacatactatggttaaagttgctaattagaaataggaacaagtttcttattaaatatataaatagaattcaaaaataataaactgaaaaattcaattttaaataaactaataaagttttaggaggaaaatatcatgggaaagattataggaattgatttaggaactacaaattcatgtgtagcagttatggaaggtggagaaccaacagttatagcaaactcagaaggtgctagaactactccttcagtagtatcattccaagcaaatggagaaagattagttggtcaagtagctaaaagacaagcgattactaatccagataaaacagttatttcaataaaaagacatatgggaactggatataaagttgatatagatggaaaacaatattcaccacaagaaatttctgctatggttttacaaaaaataaaagcagacgcggaaagctatttaggtgaaacagtaactcaagcagttattactgtaccagcttacttcaatgatagccaaagacaagcaactaaggatgcaggtaagattgcagggcttgaagtattaagaataatcaacgaaccaacagcagcatcattagcttatggtttagataaaacagattcagctcacaaaatcctagtttatgacttaggtggtggtactttcgacgtatctattctagatcttggagatggagtattcgaagtattatcaactaatggtgatacaaagcttggtggagatgactttgatgaaaagataatgaaatatattgcagatgagtttaaagcttcaaatggaattgacttaatgcaagataaaatggcagttcaaagattaaaagaagctgctgaaaaggcaaaaattgaattatcagcatctcaacaaacaaacattaatttaccatttattactgctgatgcaacaggtccaaagcatatagatttaacattaagcagagctaagtttaatgaaattactcatgacttagttgaaagaagtattgaacctatgagaaaggcattagctgatgctaaactttcattaaatgatatagataaaataatcttagttggtggttcaacaagaattccagcagtagtagaagctgttaagaactttacaggaaaagaaccatctaagggagttaacccagatgaatgtgttgcagttggtgcagctattcaagcaggtgtattaactggtgaagttaaggacgtagtattacttgatgtaactccattaacactaggaattgaaacagcaggtggaatagctactccattaatcgaaagaaacacaactattccaactaagaagagtcaagtattctcaactgctgcagataaccaaacatcagttgaaattaatgtagttcaaggtgaaagacaaatggctatggataacaagtcacttggacaattcacattatcaggtatagctccagcaccaagaggaattcctcaaatcgaagttacatttgatatagatgctaacggtattgttaaagtatctgcattagataaaggaactggtaaagaagcaaatatcacaattactgcttcaactaacttaagtgatgatgaagtagataaagctgtaaaagaagcagaaaaatttgctgaagaagataagaagagaaaagaaaaagttgaagctgtaaataatgcagaccaaactatatatcaaatagaaaagactttaaatgaagttggagataaagctactgaggatgaaaaggcagcagtaagagctaagattgaagatcttaagaaagttaaagatggagatgatgtagaagctattaaagctgcaatcgaagcagtaaatcaatcattctatccaatagctacaaagatgtatcaacaagctggtggagctgaaggagcagctgatccaaatgcagcagctggaggagctcaaagtgcaccacatgatgataatgtagtagatgctgatttcaaagtagatgaagataaataagatataaattagttgtactaaactatagttatctaatataataggatagggaaggcaagcacgtcttcccttttctaaggcatatgaaagaaaataacgatcccaaaatgccatgattatttttcattaggagaagaagcagattggactcatagcgagcctattagtgcaatctgctgatgaatgataatggaaaataggcttggcagatggacttggtatttttttgattatgcctaaagtaaataaaactaggtggtgaatttaaacgaatggcaaataaagactattatgaattgcttggacttcaaaagggtgcaagtgatgatgaaataaaaagagcctttagaaaattagctgtaaaatatcatccggatagaaatcaaggaaatactgaggcagaagaaaagtttaaagaaataaatgaagcttatcaagtactttcagatccagaaaagaaagctagatatgatcagtttggatcagctgcttttgatggtagtggaggcttcggaggaggcggctttggtggctttgacggatttgatatgggcggctttggagatatttttgaatcattcttcggaggcggaggatcaagttctagaagaagaaatggtccagtaagaggaaatgatattgagtatacaataacgttaacttttgaagaagctgtttttggagtagagaaagaaatttctgttactagaaatgaaaattgtgaacattgtcacggaagtggagcagaacctggaactaatgctaagacttgtccaacttgtagcggatcaggtcaagtaagagttcaaagacaaactcctcttggaagttttgtatcaacgtctacatgtgatacttgtagaggtactggtaaaattattgaaaagccatgttcagagtgtagaggaaaaggtagtgttagaaaaacaagaaagataaaagttaacataccagcaggtgtagatacaggaaatgtaatgcctttaagaggacaaggagaacatggattaagaggtggaagccctggagacttgtatgtaagaattaatgttactccatcaaaggtgtttacaagaaaaggaaacgatgtttatatagatgctcatatctctatgcctaaagcagcattaggtacagaaataactgtagctacagttgatggaaatgttaaatatactgttccaccaggtacacaatcaggaactatgtttagattaaaaggcaaaggaatacaaagggttaactcaaacggaaaaggagatcaatacgtaaaagttattgttgatattcctaaaaccttaaataaggaacaaaaggaagctttatatgattttatgagagcatctggtgaagagtttgatgaagcgaatgttcctaagaaaaaattatttggaaaaaataaatagaagtatatcagagaaactatttgaataatgtctaccaattagcattatttcgatagtttcttttttagataaaaattccccgacaaaacctatagttatagtcatatttcgaattataggttataatatattaaaataattatatttaggaggagaaaaagtgaaggaattgaaggaaaaattattaattgaaatagaagagtttagagaattaggaaataagtttttatctggtgaagtatctattatggattttaaaaaagtttctgggggaatgggggtatactcagaacgtaataaaaaagaattcatgataagactaagaattccttcaggaattagcagctttgagaatatgaattggctatgtgatatagctgataaatataatttagataaatttcatttaactacaagagaagcagtgcagtatcataatttaacgatagatcaagtttgtggaataatgaaggatggtatagataatgatatatattctagaggaggcggcggaaactttccaagaaatgtagctatgtctccactatcaggtgtagataaagatgaagcgtttgatgtgacaccatatgcattagctgtaaataaacattttttaagcaaaataacatcatataaatttccaagaaagtttaaagtatctttttcaagcagcgactcagatcaggggcattgtaatgtagccgatttagggtttttagcaacaattaaagataatgaaaagtattttagagtttttatgggaggcggaattggaagaaatcctcaggttgcagttgaatatgatgagcttataaaaccaagtgaagttttatatcatgtagaagctatgacaagtttattcgtaaaagaaggtaactatgaagatagaaataaagctcgtataagatatatattagagagaatgggcaaggaaaaattcatagaaacatataaggaacatttaaaagatgtgttagataataatgaattagatttatttgtagaatctaaggaaattactaaagaaggtaaagaaattgagctaacccattcaagattatattcacaaaaacaaaaaggattatacagtgtgtatttccatccaattggcggacaaatttctgttaagacattaaaagaaattttagataaattaaaagcagtaaaagacttagaaataagacttaccatgacagaaggtttatattttagaaacttaaatggtgatgaagctaaagaacttttaaatgtaacacaaaatattggaggagaaacagctcttcagcaaagtgtatcatgtattggagtgccaatatgtcaagttggaattttagagagtcaaaaaatgcttaacaatataattaattactttgcagaaaaaggttataataaagatatacttccaagagttcatatatcaggatgtggaaattcatgtgcagttcatgaagtcgttggtatcggacttacaggaaaacgtaaaaaagttggagatgctgttgaagatgtatttgaattacatattaatggatcatttgaaacaggaagtgcaaggctcggaaaagtttatggtgacttacttgctagtgaggtaccagagtttttatatgaattatcattatatatagagaataaaaatatgaatttttatgagttcgtagaaaataacgaggaagaactactaaaaataatagagaaatataaaaaataagacataatataaagcggttaaaatagtacattctcttaaatatgaggtgtactattttttatatttaataatgatagggcgttaagtattaaattggatgattttttagataaacaacttgaggggattcaagaattcttaattaatattaagaaaatataaaaatactttgagataaaagattcagtacagatatttgagttatttgcaatacctgtatatttttgagataaaaattgcaatataaatttttataggtataattattatgaaggatacggccgattaatagaacaataagacggtatgagagtcttgtttatatggtattgtgtcgataagttcaatttaataatctaaaaaacttaatggcagtaaaatgctattttttaaaagcttataaaagatggagtgaactaacatgagaatgagaaaaaaaccgtgggcaagacctgagcttgaaggttgcgatttttttgttataaatccgaaagaatataaaggtaagtggaaagaatttttcggtaatgataaaccaatatatctagaacttggatgtgggaagggaacttttatggcagttcatgcctccgagaatccagatataaattatattgcaattgacataaaggatgaggtattaggattagcaaaaagaaatatagaaaaggcttatgaagaaaaaaataggaagactgataatgtaaaattaatggctcaagagataggacttatcagtgaaatcttaagtaaagaagatgttgtaagtagaatatacataaatttttgtaatccgtggccaaaggaaaagcataaaaagagaagattaacacatatgaggcagcttgaacagtataaaacatttttaaagagtcaaggtgaaatttattttaaaactgacgatgatgaattatttgaggaatcgcttgaatattttaatgaagcagggtttagaattaaatatataacatatgatcttcacaatagtgatgttcaaggaaatgttcagactgagcatgaaaaaatgtttagtgaacaaggaataaaaataaaatttttgattgccatgaaagataattagatttataatggctagaatttaagaatttaagaatttaagaatttaagaatttaagaatttaagaatttaagaatttacccgacccacatgcgttcgcgggggaagttcgaggaaccaaatacaagatgcgcgaagagaaagttctgataaccaaatacaagatttggagcatcacttttgaactctcacttaagaatttaaacatatgaaaagatacgcacctataaaaaaagtgcgaagcacaattaagatcaattcacctataaaaaagtgcgaagcacaattaagatcagttcacatatgaaaaaagtgcgaagcaaagttaagagcttctaagcacaataaggaacttattagtcacaattaagaagtttaatattttgaaatttaaatataaaactagatataaataaaaatattttaaaatatataaatttaactagaaatatatgtaagtagttaaatagaaatctatgtaaatagttaactatataaatatatatcaatgttaaatatgtaaatatttatagttattatgcgggttacagatatgtaatataaacataatactaaatggaatccgacttacatgcgttcacttggtgcaacgacaatcatcaaatcataaatgaccaaagggaaggctggaagagtgaaataacagatttcgattctcacttatacttattgtaaggggtatatataataacttgaaagaaataaaattaaatagttaacagagagcaattgtaggaaaaaattttatggaatttaaaaatatttaagaatacatttaaaaaaatgtattcttaaattgcaaactgttactgaaactgaattagaaaggttgataaacatggatggaatatggattgaagttagtgtaataacaaagagcgaggcgttagagcctatatcaggaatattttatggattaaattgccctaatgttgcaatagaagatccggaggatttactttcaagagatcaaggaccattaacttgggattttgcagatataaatatcttagaacataaaggaaatgcagctgtagttaaagcttatttttctcaagatgataaggttgaagagattgttgaatatgttaaggaaaaactttctgaaattaaagaatttggaatagatattggtgaaggtacagtagaagctaagaagatgcacgaagaggactgggctaataattggaagcaatattataaaccagttaaaataacagataagattgttgttaaaccaatttgggaagaatatgaaaaaaatgatgaagaactaattatagagttggatccaggaatggcatttggaactggaactcatgaaactacaaggatgtgtattcaagctttagataagtatgtaaagcctgatacaacagtatttgacgtaggatgtggatcaggaatacttgcgatagcagcagcgaagcttggagctaaacatgttgttggggttgacctagatcctgttgcggttgattcttctaaagaaaatataagctttaataatttgaataatattgaagtattagaaggaaatcttttagatgtagttgatggaaaagccgatatagtagttgcaaatataatagcagaaattatttgtgtactaactgaggatgttaaaaaggctctaaatgaaggtggattatttataacttcaggtataattcatgatagggtagatatggttacagaaaagtttgctgaatgtggttttgaagttattgagataaataaagatggagaatggaactgtatagttgctaaagcaattaattagtataaatatagatatttgtaatgcaaattttggttaacggtttgaaaatgtaattatgaaaataatgcacaatgtacaattcacaatgcgcagtttaggagaaatttctaagagatttttttgaaaatctatagttgatataccgtaatcaattattatttaattgtgcattgagtattgtgaactgtgaattagagaggagtcgtatgcataagttttttacagaacctcataatattagtgaaactgaaggtagaatacttggagatgatgtaaaacatatttataaggttttaagattatctgaaggtgaagaagtagtattaaacaattgcgaaggaattgagtatctaggtgagatagaaactataactaaaagtgaagttatagttaaaattattaaaagattagatataaataatgaaagtaaagttaaagtacatctgtttcagggactaccaaaaggtcagaaaatggatctgatagtacaaaagggaacagaacttggagtatctgagtttattcctgtaacaactgcaagagtagatgtaaaacttaaaggcgaatttaaaaagcttgatagactaaatagaattgctcttgaggcatgcaaacaatcaaaaagaagtgtaattcctcaagttaaagaagttatagatttcaatgaggcaataaatgaattaaaaaagatggatttgattattgtaccttatgaaaatgccgaagattttggaattaaaactcttgtgagaaaattagaaagagataatgtggatttagataatataaataatgttggaatattgataggacctgaaggtggatttgaggaatctgaaattgatactttaaaagaacaaggtgcttatatagtgactcttggaaatagaatattacgtacagagacggctggatttacagctacggcattaattcaatatgaattaggagatttaggaggaaagctatcataatgggagagaaccaaatgaaattagtcagagcaggtagtgacaagactaagcttaagaagttatctaacaaagaaccaataaaaaatacagaggggaagagtcttgtggcttttgcaactcttggatgcagggtaaatcattatgaaacagaggctatggcggaaaagttcataagagaaggttatgaagtaactgactttgaaggttttgctgatgtttatgttataaatacttgttctgtaactaatatgagtgataaaaaatcaaggcaaataattagcagagctagaagaagaaatgaaaatgcaataattgcagctgttggatgctattcgcaagttgcgccagaagaagtttctaaaatacaaggggtagatgttgtacttgggactagaaataaaggcgatattgtttattatgtgaataaggctaaggatgagcaaaaacctcagttaatggttggagaagttctaaagaataaacagtttgaagaattaaatatagaagagtatcaagataaaacaagagcatttttaaagatacaagatggttgtaatagattttgtgcatattgtctcataccttataccagaggaacaacttgctcaaaagaccctcaaaaagtattggatgaaataaagaatttaagtgaacatggatttaaagaaataatattatcaggaatacatacagcatcttatggtgttgatttagatggaaatgtaactttaataactttattagaagaaatagagaaactggatggaattgaaagagttaggataggttctatagagcctagtttctttacagatgaagttatcgagaaaatgaaaaaaatgaaaaaactatgtccacaatttcatttatcacttcaaagcggctgtgatgcaactttaaaaagaatgaatagaagatatactgctaaagaatacgaagatgcagttaatagaataagagaaaaccttaaagatgcctcaataactactgatgtaatcgtaggtttcccaggtgaaactgatgaggaatttaacgaaacttatgaatacttaaagagaattaaattaactaaaacacatatattcaaattcagcccaagaaaaggtacgaaggcttcagatatgcctaatcaaatagatggaaatgtaaaagacaagagaagtaaggctttaattgaactaaatgcaaagaatgaaggcgattttagtaaatctttagttggaagagaactagatgtattagttgagcaagaagtatctaataagcctggggtatttgaggggtatacaagaaattatgtaaaagttgaaattccaaatggaagcagagacatgataggaaaaataattttatgtaaaataatggcctcagatgcggaatatgttgttggaaaaattatatagttttggtataatataaatcaagataagattgattaaggatcatttttggaataagataatataattcaaagagaatttctaaatatgaattataaaatctcgattcttacgtttgtgaattgagattgttacttagaaggaggtgaatttatggaaggttgtatattttgcaaaattataagtggggatatccctagtaaaaaaatatatgaagatgataaagtttatgctttttatgacataaatcctgaagctccaactcatttcttagttattccaaaagaacatatcgaaagtgctaatactttagatgacagcaatattgatattgtatcacatatatttaaagttattggtaaattagtagtagatcttggaatatcagataaaggatatagggttgtaaataattgtggtgaggatgcaggacagacagtaaaacatattcatttccatgtacttggagggcgaagtttacagtggccaccaggctaaatttgagttgttatttgatcaatagtaactggagattttttcttaatttcttgacattattaatttaaatattgtataatatagcatgtgttattaagcccatagctgagttaatttaagctagcggagggagggatagtaaatgtcagaaattaaagttggagaaaacgaaacacttgaaagtgcgttaagaagatttaagagaaaatgtgctagagctggggttctttctgaagttaggaagagagaacattatgaaaagccaagcgttaagaaaaagaagaaatcagaagctgctagaaagagaaagttcaaataatgatattttcttttgaaagaaggtacaaaaatgtcatcaattaaagatagattgcaagatgattggaaaattgctttaaaagcaaaagataagttcacatctagtgtaattagtacagctaaagctgcagtattattggttgaaaaaactgataatagaaagcttgaagatgatgaagttattacaatattagctaaagaaatcaagcaaagaagagaagctatgcttgaatttgaaaaggggaataggcaagatttaatagatcagtctaaggctgagattgaaattttgttgaaataccttcctcagcagttaagtgaagaagagataaaacaattagtaaaagaatcagctgaagaagtgggtgcaaatagcattaaagatatgggaaaagttatgtcagctgttaaacctaaagtagtaggaaaagctgatggtaaacttgtaagtcagcttgttaaggaatatttaaataataaataagaataaaattcaagattgttttgagttttatactaatataacaggacataggattataaagagtatcctatgtcctgtttcattgttatctaaaattggactagcaatgaaaggataatatttggttcatataactagaatacattatcgtaaatgaattagataaagccataatagtaatgattggctttatttttttgcaggaaattatcattattattaaattatagaattaattcgcaaatcctatcataaattacaatgagaaagtttatgtgggaggaaagtatggaagaaaaatttcaaagaggtaaagaaaagatacttagcaagttagattttccaagtgacatttcattagatctaccaaagataatagtcgtgggaaacagagaaataactattgaaaatcataagggcattatatttttcgaaactaatatggttaaaataaattccagaataggtgcaatcataattgaggggaaagagttcgaaatactttttattgcagaaacgagtataacaataagcggaatctttaaaggtatttcatatgagaggtagaatattatgtttagcagcttgaaatcgggacaagtaaccatagaaattaatgctttagtgccagaaaaaatattaaatgccttttggaatagccaaatctatacctgtaatatagtgaaagtaagcttgacaacggtaagagtaactatatattacagagattataaagatgcagaaatattaataaaaaaatataaaggaaaagttaagatagtaagaactagtggaataatagttttacttatgaaaatgagaagaaagatttctctagttataggaatgggattattttttgctgtgatatatatattatcaaattatatatgggctatagatatagagacacagaggaatttaagtccatttgaagttagacaacagctctcatcaattggaatcaaaccagggcttagcaaatcacaagttaatgtatatcaaatagaaaaaaagatggaagatttaaatagccagataatgtggattagggttaggatagaggggtctacattaaaattggttataaaggaaaaagtaaatcctccgtctacagaaaaaacattatataatcaagttgttgctaaaatggatggagaagtaaagagagtatatacgaattcaggaaatccagcagttgtgccaggagatatagtaaagaaaggtgacgatctaatattgcctatccaaggaagggaaggctttcagatggaagtaaaaccgagtggaacagttatagcaaatactttttatgataaatttatggaggttcaaataagtggagaaaagcttgagagaactggtaacaagaatagtgacatatacttaaacttttttgggaaaaaagtttacttgaaaaaagctataaatcaatttgaatattatgataaaatagaagagaaggatggtttcgttaataagataacatatttcgaaaaaaaaggtataaatgtaaacttagataaagaaagtacagttaaagaagctacagaaaagttagagggttcattgagaaaaacacttagcaacgatgcaaagataatagataagaaaactgcagtagaagatattgaaggcggaaagatcttaattaatgttaaatttactgtagaacaggatattgctaaaaacgtatcataaggggtattcaaagttgtttttatgcctattacttattattaagatgaaaaggtgaattacatggatataaaacaaaataataaatggaaaaataatagaattcaaagaattgtattatttatacttgtatttagtataggctatttattgcttgttaccgcaataactcctaagcaatatagcttaaaagaaggagatataccaagagtagatataaaagctccaagagatatagtggatgaaaaagctacaaaggaaaaagaagatcaagcggccgaaaaggtagggaaacagtatacatcaaagccagaagttaagaaagaagctgaggataatgtaagggcattgttcgataaacttgtatcattaagcaatatggcgagctctaccgtagctgataagcaaactgagcttaagaaattaactatatttcaattaacagatgaacaatgtaaggcgttgataggaatatcaaaagatactttgcctggcatagaggacaaaatagtaaatataattgacggcgcatatgaaaaaaatatacaagaaaaagatgaaggtgcgttaaaagaagcaaaaggagttgtttcaactcaaatagataatttaaacttagataaagatgcatcgagtgctttaaagcaaatagctcaaacacaaataaatccgaatgttttttttgatgaagaaaaaacacaagaaaagatacaagaagtcaagaagaatgtatctaaagtaataataaagcaaaatcagattatagttaaagaaggagaacctgtaacacaagatcaaattgatattttatcagaccttggaatgcttaacgatgagaatgtaacagcttatgtatatatttatttagcccttgcaatattttggatgataatattgtttcttcaatatggatatgtgagaataaattatggtgaaatatataagaacaataagaagcttattcttataagtacaatcaatttgatttcacttgtattagctagaactgtaggggttatatcgccatttctaattccgttcgcttgcgctcctatgatgcttacgctattactaaattataagatatcatttgtacttagcgctttaaatgcaatagttataggtgctttaaatggttttgatgttcagattattattttgggaatagtaagttcggtattaggagcggcatttttgaaaaagatgcaacaaagaaatgaattgctatattcaacattatatactgctgttgttaccgtaatacttacattgtctacgggaatattaatatcgagcaattttagagatgtattagtgaaaggtgggatcacattcattggaggccttttatcaggtatatttgcattagggatattaccatttctagaaggtacatttaatgaggttactacactaaagctgctagaattatcaaatcctaatacaccactgttaaaaaaattattaatggaagctccaggaacatatcaccatagcatgcttgttgcaaatctctcagaaatggcagcagaagaagtaggagctaattcagtaattacaaggataggatcatattatcatgatattggaaaaacagagaggccatatttctttggagagaatcaaatggggatagataatccacatgagaatatacctccaaatttgagtgctatgataataaaatctcatgttaaagatggtctagagttagctaaaaaatataagcttcctaaggttatccaagatatcatattagagcatcatggtaaaacattagtaaagtatttttactatactatgaaaaatagtgctgaaaatccagatgaaataaaagaagaagattataggtatgaaggcccaataccaagctcaaaagaagctggaatagtaatgctatctgatagtgttgaagcggctgtaagatcaattaagaaacctactaaagatgcaattaaccaaatggttaattgcattatagatgataaattatcatcaggacaattaaacgattgtgatttaacattaaaagatatagaaaaaataagagtatgttttttgacttcgttaaatagcatataccatcaaagaatagaataccctaaagaaaaaatgaaggatttcaatggtgaaaacaataaaggtgaatttaaaactaaggagtagtttaaataatgatttatgtggataatagacaaaataaagtagaagcaagtgaagaattaatagaaagactaacggaagtaatagaatttgcattaaaagaagaggaagtaaatatgaaatgtgaaatttcattattgttcgttgataataatgagataaaggaaataaataatgagacaagaggaataaatagagaaacagatgtattatcttttcctatgttagaatacgaaaataagaaagtgtttaaggatatttataaagattataagttttctcaatgtgattttgatggtgatgaacttgtacttggagatatagttctttcactagaaaaagcattagaacagagtaaagaatttaatcattcgtatgaaagggaagcttcatatttagttgtgcattcagtattgcatctactggggtatgaccatatggaggaggatgataaaacaattatgagaagtagagaagaagatattttaaataaacttaacataatcagagggtaatattttttattatgtaaatagaagtaggggtaaataatgaaaatgaaaaaaacactggaaagcttcaataatgccataactgggattatcgatactgtaagaactgaacgaaatatgaaaatacatttaattgtggctttagtagtactgattgcaagctttttctttgacataacaaaatatgagtttctgatattagcagttacaataactatggtaatagctgctgaacttataaatacagccatagaagctactatagatatgacaactaattattatcatcctttggctaagattgccaagaatgcggcggcaggtggagtattaataacagccataaatgcattactagttggctacattatattttgggataggctcagtagattttcattttctttgattaataaggtaaagaattcagagccatatacaatattgattgttctagtaatagtgtgtatagtaactataatagcaaaagcaatatttggagaagggaccccgttaaaagggggaatgccaagtgggcacagtgctttgggattttcaatagcaacagcaatatcgctaataacggaggaaccaatttgtattctattgagtttcctattggcatttataactgcacaaagtagagtagattcagaagttcatagcattttagaggtaatagttggagctatatttggtatattattaactttgtttatctttacattatttaggctttaattaaatatagaataataaaaataatatttataggagaagatataagatgaaataaaacttatattgtctcctatttcttaaattataagaatttatgatttaattcataaggaaacaattgggagtaattattaaattattatatgatcaaattaagaatagtagattgtcaatttacttataaatagagtatactatttgtaaaataggataacgttagttaagcttttttaagcttattttgaggaggaaaaaatgtttaaatcaggatttgttacaatagttggaagacctaatgtaggaaaatcgactttattaaattatataatgggggaaaagttatcaatagtttctaataaacctcagacaacaagaaataatatacaaacaatattgacaggtgatgattatcaaatgatatttgttgatacaccaggtatacataaacctaaacataagttaggagaatacatggtaaattcggcaaaggaatctactaaagatgttgatttagtattattcttaacaaatccagatgaggagattggaaagggcgataaatttatattagaaaccttaagggataaaaagtgtcctgtatttttagttttaaataaagttgatgaaagcacgcaagatagagtggcaaaaagtttagaaatgtatgcaaaagaatttaaatttgcagagataatacctatttctgcaataaaagggaaaaacgttgatgtattagtagaacttatgaagaaagcaatgccagagggacctaaatattatccagatgacatgataacagatgttcaagaaaagtttgtagtatcagaaataattagagaaaaggctttaagaaccttgagagatgaagtgcctcatggtatagcagtagatataattcaaatgaaacaaaatgaaataggaacatatcatatagaagtagatttaatctgtgaaaaagattcccataaaggaataataattggaaagaatggtcaaacacttaaaagaataggcgaaaattcaagatatgaattagaaagatttttaagatccaaggttaacctaaaaatatgggtaaaagttagaaaagaatggagagataatcaacttttattaaaagaattaggatataaagcgaattcaaagaaataaagtattaattagaaatagataattagcctaacatattatttttttatatattccaagtgggagatggttgacctgtcaatagttgaaacaaaagctgtaattataaaaacacaagattttaaagagaatgacaaactagtttggttttatactgagaagttaggtaaaattacagctatagttagaggtgctaaaaaaagtaaaagtaagttcttagcattgacattgccattatgttatggagaatatatggtatataaaggtaagagcttgtacactcttcaagaaggaaaaataattcaatcttttcaaggacttttaaataatttacataaacttacatattcctcatacttatgcgaattaatagatattgcttgtgctgataatgaaattaatatggaactttttaagacattgattacaacactatatttattaaatacagatgccctagattatgaactactaataagagcatttgaattaaaattgctaaaaacaactggatataatctaacattaaataattgtagcgtatgtagaaaaaagatatcttcatctaattatataagtttatcccactatggagggatatgtgatgaatgtcccaaagaacatggagtatttatttcaaaaggtgcatataatgctttgaggtttttgatgaatatggatatagataaattatatagactaaatttaaatcatgaaataaaaagtgagattgaaaaagtaattacttttttagtatctaatagctatgctaaaaagcctaaaagtttggagatgttaaaatttattaaggagtgatgatttatggaaaatataacattagaaaaagttgatatgatacgtgaaagaacgggagtaagctatgaaaaggcaaaggaagctttagaagtatgcgaaggagacgtattagaggccttaatatacattgaaaagtctcaaaagttatcagatattaatgatgaatttgttgatgaggaagtaaataaggcgcctatctctatagaagaactaaaggctttgattaaacaaataatagaaaaaggaaatgttactagaataaaggttaagaaagatgataaggaacttgtagatattccagttaatgcagggattgcagcaggagttgtagctatcataattccaccaatacttgcagcaggggttatagcagcaatagcaactcaaattacaatagagataactatggaagatggatcagtggaagttgtaaacacctatgtttcagaagtggcaagtaatgttaaaaataaggccgctgattttgctgataaaattaagactaaagttaatgaaatgaagaatgatataggcaaacatagtgatgattcaaaacaaaaagtatatactggttcagatactgtatatacctatacagttaattttgatgaagagaaagaaaattcagaaaattaagtgatattgagagtaatataaagaaaaatagatatataagtgatataaaattaatatacaagaaatatttagcgaatttatttgatttttctgaaaattaagtctagtcaaacaataattacatgatataattagagagtagtaaaaattaatgaatttgaactagatatttcttgtatttacagaaagagggataagattgaaattatcacctaggcaagaagaaatagtatgcttagtaaaagaaaatgcacctataactagtgaagctcttgcagaaaaaattggagttactagagctgcgctcagggctgatttagcagtactgactatgataggaactttggatgctagacctaaggtaggttatgtatatacaggaaagacttctaatggattaatttattcaaatattaacaaaattaaagtatccgaaataatgtcaaaacctgtgactgtcagtgaagatacgatggtatatgatgcaatcgtatacctatttctcaatgatgtagggacattatttatagaaaataatggggtgcttactggtgcagtctctagaaaagactttctcaaaatttcaataggggggactgatatacatagagttcctgttggagtaattatgacaagaatgccgaatataatttgtgcaaataagaatgacaatgcatatgatctggctaagaaaattattgaacatgagattgatagtattccggttgttgaaataatagaaaagtctgatggaaaagatcagatgaagataatcggaaaggtttctaagactaacataacaaaattatttgttaaaattggagaaaatgagaattaattaacagggtagctacgaagtctttagataggcatcgatagtaaatatagtgagaaataataagaaaagagggagtattgagatgtcaaataagtatgtatatctttttagtgaaggaaatgcttcaatgaaaaatctacttggaggaaaaggcgctaacttagcagaaatgactagtctaggaattccagtgccagatggttttattgttacaacagaatcttgtaataaatattatgaagatggtagaaagatttctgatgaaataatagggcaaatctatgacagtttatcaaagcttgaagaatctacaggtaagaaatttggagataatacaaatcctttactagtttcagtaagatctggtgcaagagtttcaatgccaggtatgatggatactatcttaaacttaggattaaatgatatagctgtggaagcaatggcagaattgaccaataatccaagatttgcatatgattcttacagaagattcattcaaatgttctctgatgttgttatgggaatagaaaagagattattcgaaaataaaattgatgaacttaaggagaagaaaggtgttgaatttgatacagatttaacagcagatgacttaaaggaattagttagtgaattcaaagaaatttacagaaaagaaaagggtgaggagttcccaagtgatcctaaagctcaattaatagaagcaattacagcagtatttagatcatgggataatccaagagctatagtatatagaagattaaatgacatcccaggagaatggggtacagctgtaaatgtgcaacaaatggtatttggtaataagggagaaacatcaggaacaggagttgcattttcaagaaaccctgcaaatggtgacaatgctatatatggtgaatatctaatgaatgcacaaggtgaagatgttgttgcaggtattagaactccacttgaaattggaaaattaaaagaacaaaatccagaaatatatgcacaatttgaaggaattgttaatacacttgaaaatcactataaagatatgcaagacatggagtttactatagaagaaggtaaactatacttcttacaaactagaaatggtaagagaacagctcaagctgctttaaaaattgctgttgatttagtagaagaaggaatgctaagcaaggaagaagcaattttaaaagttgagccaaaacaattagatacattattacaccctgctttttatactgaagatttaaagaaagctacaccaattgcaaaaggattacctgcatctcctggagctgcatgtggtaagatagcatttactgctgatgaagctaaagatagagcagcacttggagaagatgttgtacttgtaagacttgaaacttcaccagaagatatagaaggaatgatagcagcacaaggtatccttacagtaagaggaggaatgacttctcatgctgcggttgttgcaagaggaatgggaacttgttgtgtagctggatgtggaactataaaagttgatgaagtaaagagaactgtagaagttaatggaaaagtttatacatctgaagattacatttcaattgacggtacttcaggaaatgtatatggagaaaaaataaaaacagttacaccagaaatttcaggccattttgcaacatttatgggatgggctgatgaaataagaaaattgaaagttagagctaatgcagatagcccaagagatgcaaaacaagctgttgagtttggtgcagaaggtataggtctttgcagaacagagcatatgttctttgcagaagatagaattatggctgtaagacaaatgattacatctaaagatctagaacaaagaaaagtagctttagataagattttgccaatgcaaaaatcagatttcataggaatttatgaagcattagaaggaaaagcagttacaataagattattagatccacctctacacgaattcttaccaactgccgatgcagatataaaagaattagctagagaaatgggaataacttatgaagaattaaaatctactgtttcagaattacatgagtttaatcctatgatgggtcatagaggatgccgtcttgcagtttcttaccctgaaattgctgaaatgcaagcaagagctataatagaggcagcaatagaagttaagacaactaaaggctatgatattgtgcctgaaataatgattccattagttggagaaattaaagaattaaaatatgttaaagatgtaattgtatcaacagttaaagctgttatggaagaaaaaggagtaactttagattataaggttggaactatgattgaaattccaagagcagcattaacagctgatgaaatagcaaaagaagcagaattcttctcatttggtacaaatgacttaactcaaatgacatttggattctcaagagatgatgcggctaagttcttatctgcttattatgaaaagaagatttacgaacaagatccatttggtaaattagatcaaacaggagttggttctttaattaaaatagcagtagaaaaaggaaaatctactcgttcagatatccatttaggaatctgcggagagcatggtggagatccttcatcaattgaattctgccacaatataggacttaactatgtatcatgttcaccatttagagttccactagcaagacttgcagctgcacaagcacaagtaaaaaatccaagataactatgaataattaaagattataataaagtagcatataaatcttagtaaaagaagatttaaagcaaattatattataaaaatatagggcattgtaatttgaaatcacatgtgattttaattacaatgctcttttatgattgtattattgagttattatgatgaacgtattttaggatacaagttggctgatattttacgatattgggctggattgataccgttaatttttataaaatttcgaagaaaagaagaatagtttccaaaaccataatggctacttatataagaaaaggttctatttgtattctttatatcctcgcaggcacaaatcatcttcttattgattatataataatgaacggtgatacctgttaagtacttaaattttcttataaaatgatatttacttatatttaaatagttaactaaatcatctataaaaatttcctctgtaatatgctcatctatgaaataagatacttgatctattaactgatggtgattattagataacaaattatatatattttttttgcatagattgcatagacaagtgaaaaagatagttaaatttgctttgtcaaacaaatctttgccttcaaaattttgtttatcatcaaaattaaatgttgatattttgattagtgaatattggagtatatcattgtagtagctaggaaaatggtatgcaaagttattagtattctgactatattcaaaacatgaatatagttttaatgagttgtcagatagtgaatccaaatagggtctgctgatccataaaattaaacgtttagaattggtatgtatggtatcattgtagttatacttatgcattataccactacttattaaaagaaaatcgccacgttttaagtaatatgtagaatcatttacaagcatagaacattctccatccaatataaaaactacttcatagaaatcatgataatgataagtatctacagtcatagggactccgtgcttttcatagatctcgaagttatttccaacaatttgcttgtgattatcgtcttctgaaagatacttgtttgtaatttttctcataaaggttcaccccagtaataaattttattaaatatatttataaattaataaatgcagactttcaattatagaaataagctgaaaatatttttgctataaattcagttaatcaatttgttggatagcaatatttgcataaaaataagcaactcctataatatataaatacaatttctaagagtataataacaactaaaaggaagtcaataactaaagtctatgtatataacaatagttaataatagtatatagatattaaataaaagtaattgttgaagtatcaatattggctataattatagcatattagtaaagagttttgtttggggtgaataggaattttaccataaagaagtagtatatgataaaaggagagagaagcgatggcagattataatattttgaattatggagcccaaccagatggaaaaacgaataaccgtaaagttattcaaagagcaattgatgagtgtactgaaagagggggtggacgagttattattccatcaggaaactttttaagtggaactttgattttgaagagtaatgttgatttacacttggaaaatggagcgattttaacaagcagtattcggcaggaagacataatagattttgctagaaattttaaagatgaaaatgaagacattggatgggaaggtggttgctttctgtgcgcatttcatgaagaaaatataagtattacgggtacgggaattatttacggacaaggggacaaaatattctatgatgataatgcagatggaggatttcatgaatgtcctttaaatataagaacagagctgcgacctagaacaactttttttgaagatattaaaaatttagttgtaaatggtattacttttaaagatgcagcattttggactctacatatggccggatgtgagcatgttatcgtggatggaataagaattttaaatgatcaacgtggggtcaataacgatgggattgatccggatacttgcaaagatgttgttattagtaactgcatagttaaagctggagatgatgcaatagttataaaaaattctgagcccatgtcagctaaatatggtagttgtgaaaatattgttattagtaactgtatactatattcacatgatagtgcgttaaaaattgggacagaaacatttaatgcaattcgtaatgtaatattaagcgattgcgtattttgtgattgttcacgcggagttggaatatgggcaagagatggggctattatagagaatattcatgtacatcatatatcaggtaacactaagcgatatgcagattgcccagagagaagtttcgctccaagatggtgggggaaaggggagccgatatttattaattctacttatagaaattctaatcataagtttccaggaaagattcaaaatattacttttgatcatatttatatgaaatgtgaatcaagtatatttattgcgggtgaagaagaatcacgcattaagaatgtatctatacaaaatattaatttgactatggaaaaacagggaactcaacttgctgatgttttcgatgagcagccttctgaacgtaatgtttatcctcatgcgattccagtagtttattctagatttactgataatttagaagtggacggaagtgtaaaatacgtagaaccttataatatattagagaatagaatttatgaagttgaagattgctctaacgttaatatttctataaaggaatgtgaataattatgaaaacagttttgagagttcattatagagcaaatttaaaagataattgtgatagtggatcttttgaaaaggctttagaagaatgtaaacaaagagtttcacttgaaattagtaatggtaaaatattgacatgtgctatctttcactataaaagtatggcatttttatatattgaagttattacagataaagaagtttcagaagatgtagatagcaattatatctatcacaaagcaatagaaaatatatttgagcctcttcagaaatttttaaaagtttggccaggcatggaagaggatcgtgtttgggttcaaatgttccacatttattgttttgcttatcctgagagtctggaagaatggagaagacctataccaccacataaaagatgcggacgaattgctatattatatcctgataaactatattcatatatttatcatcattatgctattgtaaaagaaggatattttaaaggtgataaatatcagtcaattgctatacatgaaaatattgctttttcatatttcgaaacaccacgtgatagatatatcactagtgtaaaacgaaatgcatcacaagaatctattgaactgcaaaattggaccaacgtagatccagaaagtcattttattcatttacctggttcaaatggacaaaattttttagaaattccatgttatttttcgatttctgatagttaaattcttgcttatttaaaataggattatctttatataagatagtaaaaagggcctgttaaattataaatttaacaggtccttcatattaagtttacagaaacaatttcaaagtaaagtcatatcgaattttttttgtactttatttattatatctagcgcaaaatcatattgaagatttgtttttgatgtcgcgtttattattaaagttaaaaaagcagatttattacacttgtgaatattcctatagtagtctcttgatatcctccagtatttttgcggaaagcaaatataagaaattaagtaacgtaaatctgagtgtgttaaaggacacaattcattatagacatctaatatagatagagctaactcaacattccattttgtgttttctcgtttaagtaatcttcgcataaaatatgctagatcttttgcactgtaatctactttgcacttatcaaaatctatcacccaaggatctagatcaggaggaaaaattagatttttgtttacatagtcaccgtggcataaagatttacttaattcattattgtcaattttatttgatatgtctagagagagtttagcaaggcgtaaatttgtatcaaaacttgaaataaattgtcttgaaaatgaatctttgtatttaaacgattcatttgatgctttaagtaaatcttcaaaatgttttaaggtagatatgtaataatcctcaaatccttcttttgctgaacttcctaaaataggtttaaatttacgagatactgaatgaatctcagagagttttcttacagagattaaaacatgatccaaattatcgaaattacatttctcaccttcaatccaaggagttaatataaaaagcatatctcgataagatacaaatctattattatcaattgtaggtaaaagttttgagaccctaatattatttctatatagccactcaatggctgaatatacatatagcaagtcatttaaattataataaactttttttagacagtaatttttatctttataatttaccctataaactgctctttgcttatcagtatctttaaatttgattattgaaatttgagagttttgtaaattatagtatggtaaaacattttgttttataatttctggggaaagattggattcttgtaaagataaaacttcagtacccataaatacgctcctttataaggtgatttttattgaacttttatgatacaaggtaaactttaattaaaagttataccttaaagtaacttaatataattttaaaacttaattaagatatagaaatatatatagtaggatatctatattaaaaaaattcctaattattaaataatattaatttaagcctaatattagactaaaaataataaaaaataaaaattaataaatataaagatattattttttagttatttgcaaataataaatatagttaataaatagaggaatataatgatattgatagaatacataaaaagaggtgataatatatgaatgtaagagaaaaaattcaaaattttgaaagcttgacattaattaaagaagctgctttttcaaaaaattctattggcagaaaaattaaagaagaagatgacgatattagaacttgttatatgcttgatagagatagaattattcaaagcaaatcattcaggcgcctcaagcataaaacacaagtatatataaaaacatttggagatcattataggactagattaactcatacattagaggtatctcaagttgcaagaaatattggagctggaatcggattaaatgaaaatttaattgaagctatagcgttagggcatgatcttgggcatgttgcttttgcacacaatggagaagaagtgctaaatgaatacttagaagatggattccgtcacaatgaacaaagcgttagagttgttactaaacttgaaaataacgggcagggacttaatctaactgaagaagtaattaatggaatattaaatcatagtgggcttggaagcgttaaagatataattacattagaaggaatagtggtgaaatttagcgataaaatggcgtacttgaatcatgacattgatgattctataagagcaggtttattaagcaaagaagagattccaagagaaattgttaaagtattgggagatacttcaaacgaaaggttaaatgtcttaattaaagattttataaaaaaatcaaatgataatctcaacaatggggtaaaggaaattgggttaagtccagaaataagtgaagcaatgactgaacttagacaatttatgtttaaaaatatatatttaggggatacattaaaggttgaaagaaataaggcgaaatttgttttgaatcaattaattaaacattttgaggaaaatcctcatgagatgccagagatttatatgagtatagctaaaaacgaaggcttgaaacgaggcgttgctgattatgtagctggaatgagtgatgattattgcttatcattatttaataaaatatttatccctaagtttgtaatagattaataatacatgagattcatgtcttagaaagtttaaaactataatgaatttaataatattctaaatgaataaagatttgtaataaaaaaagaggattttaaattaataaaaagaattactttaatatatagtattattcaataaatattattttataactggtaaaactttaaattaaaaaaaataatagttttcgaattattttagaaggaaaactcgttattatgtcgaataatatataattgccaaaaaaagcagaggaaggagatgtctccttgcaaatatcagaagaagttcttgaaaggataaaagaacaaaatgacattgttgatattatttcagaggatgtaaggctaaaaaaatcaggtagaaattttatgggattatgtccattccataatgataaatctccatcatttagtgtttcaagtgaaaaacagatatacaaatgtttttcatgtggagaagcaggaaatgtgcttacgtttgttatgaaatataaaaaactcacttttgtagaagctgcaaagtatctagcagataaagctaatattccgctacagataaaagataatgaaaatagcgcagtttctagaaagaaagaagttttatataaagtaaatgttgaaacagctagatattattttgctaatttacaaagaattaaaatggcaaaagagtattttttgaagagagggataaaagaagaaaccataaagagatttggtttaggctactctcaagatagctggcatggattaacaaaccacttaagaacaaaaggatataaagataatctgttacttgaagctggattgatttcaaaaagtgagaaatcagggaatgtttatgataaatttagaaatagagtaatgtttcccgtgtttgatgtaagaggaaaagttattggatttggaggtagggttttagatgattcaaaaccaaaatatttaaattcaccagagaccatgatttttcaaaaagggataaatctttatggattaaattttgcaattaagaataagctaaaagaggattacattattatagttgaaggatatatggatttaatatcacttcaccaatctggtataacaaatgttgtagcatcacttggaactgcacttacagtaaaccaagcaaggcttcttaaaaggtatgttaataaggtaataatttcttatgatgctgatttggctggacagactgctaccttaagaggtctagaaattttaagaggtgctggatttgatgtaaaagtattaatagtaccggatggaaaagatccagatgagtttgtgaggaatcatggaaaggagtcatttctgaagttggcaaatgaagctcttcctttaattgaatatagaattaagaaagcagctgaaggcataaatctaaatagtggaaatgatctagtagaatacggagaaaaatttgcagaaattttagcagatctaaatcctatagaaaaagatgtatatataaagaaaatttcagaagaaacagcaattaaagaacaggcattatatgacttactttcacaagtaataacaaaaaaacaaaaagaagacaattttgtgaataaaaaggaatattttggaacaaaattatatgtagaacccgcatacttaaaggccgaaagagcattattaaaactaatgttcaaagatgaattttatgatgagattaaaagctccataaaatcaggagattttgtaatagaatcacataataaaatttattcattaatattacaaggcaaaagtgaggatactaatgatataggtaatatagaatcctatgtagaaagtagatgtgacgatatagaaagttctaaagagttgaccaagataagggaacatgagattttagattttactgatagagagcgactaataaaagattatttaaaagaggtaagaagctttaaacttaagctgcaaattgaggatttaaagaaaaagcaaaatagatttgaaaaagaggggaaaattgaagaatctataaaaattgcaatagagcttactaaattagctgaagcacttaaaaagggagagagaggttgaaggttatgacggaaggaggcaataataagatggaacaaaaagcgaatggaaaagtaacaaagccaaaagacgataaaaaagataaaaatgctaaaatggcggctgtaaaggaattaattgacaagggtaaaaagaatggttcactaacatataaagaaattatggaagctatggatcatattgatttgagcccagagcaaatagaaaagatatatgaagttttggaaatgacaggtgttgaaataataggtgaaattgctgatacagaaactgaagaagaaattgatttatcggtcccagaaggtatagctatagatgatccagttcgaatgtatttaaaagaaattggaaaagtgcctttattgtcttctgaacaggaaataacttatgcgaaagaaattgaagaaggaaaccaaaaggctaagaaaaaattagctgaagcaaatctaagattagttgtaagtatagctaaaagatatgttggaagaggtatgttattcttggatttaattcaagaaggaaatttaggtcttattaaagctgttgaaaaatttgattacagaaaaggatataaattttcgacttatgctacatggtggattaggcaagcaataacaagagcaatagcagatcaagctagaacaataagaatacctgttcatatggtagaaactataaataagcttattagagtacaaagacaattgctccaagaattaggtagagatccattcccagaagaaatctctaaggttatggaacttccagtagataaggttcgcgaaattcaaaaaattgcacaagaaccagtttcgttagaaactccaataggtgaagaagaagattctcatttaggagactttatcccagatgatgaagcgccagcaccagctgaagcagcagcatttacaatgcttaaggagcaattaataaatgttttagatacattaactcctagagaagaaaaagtattaagattaagatttggacttgatgacggaagagctagaacacttgaagaagtagggaaagagttcaatgttactagagaaagaattagacaaattgaagcaaaagctttaagaaaattaagacatccgtcaagaagcaagaaattaaaagattatctagattagtagctaaaagcacctaaaattaggtgcttctttttaaataagaaattaatagataccaaactttaaaactagacttgtgtagtaacttaccgaaatcataaatattttgattccgaaaagctatgaacttaagggtttagcaactttgtaaatacattcatctaataagtcgaatccttaaattgaatatctaaaatttataagtaagacaaaaaagaggtaaatatggaattaagtaaaagactaaaatggattatagaaaaaattaataaagcagaagtaataatggatgttggaacagaccatggatatataccaatatatttagttaaacacgatatagctaaaaaagttatagcatcagatattaataaagatccactcaaaaaagctaaaattaatgcagcacttgatggagtattagataaggtagatttaagattaggaagtggtctagctgtattaaaaaataaagaagctcaagctgtaataattgcaggaatgggtggtaatttaattagagatatattagaaaatgatttagataaggtgaaaaaattagaatatttattgcttcaaccagcacaaaacccagaagtattaagagaatatttatatactaatgattatgaaatattagaagaggacatttgcttggatgaagacaagtattatgagatatttaaagttaagtataaaaaaggtgattatataaaattagataatatattttatgaaataagcccatttatattaaataaaaaattaccactatttaaatcatatatagaaagcaaaattgaaaaaaatgaaaaagtaatggattttattaaagataatactgaacatgcaatttcaagaagaaatgagctaatagaaaaaaatgagaagttaaagaaactactaaaaagtttttaggcggtgagattatggttcaagtaaaagatataggaagagaaatagaaagatttgcgccaaagtttttaatggaatcttatgataatgttggcctaatggttggagatgaagataagactataaacaaggttttattatctttagattgcacaaatgaagtaattgaggaagcagtggatttaagatgtgagttaataataactcatcacccattgctatttaaaagacctaagagtatagttaaaggagatttattggggaacaagttgataaatctaattaaagaggatatagctttatactcttgccatactaatttagatagtgctaaaggcgggattaatgaaactatagttagaatgttaggatttgagtcacaagaaattattgaacccaatgaatctaacaattataaagatggcggaattggaagactagttaaattagacgaagaaataatgttaaatgatcttatagaaattattaaaaaaaatttaaatgtaaaaaatatgaggattgtcaggggaaaaaataaagtaaggacaatagctataattaatggcagtgggcaagatttcttttataaagcaaaagatcttggtgcagactgtataataacaggggatacaacatatcattttgcatcagatttcaaagaattaagtataagcataatagatgcaggacatttctcaacagagtatcttgtatttttaaaaacattggattttttaaaggaaaaatttaaagatgtagagttcattgcttcaaaaaaaagtgaagatccttatgagtttgtttaataaattaatatttagtaaaactttatattaaggctataactgcactaaattatttaaatgttaagttctaatgcatataattagctgaaaaagagtttactaaaaaaatgaataggtgcatatactaatattgtaataataattgtgcggtgaattatggggaaagatcatgattttaataataaaaatagtgaagatttaaaagatgacttgaaaaatttctttaaacatagtagaaaaacaatacgaaatttttttaggggaggaagcagaagaagtaaatatggtggatggaatggtagatttccaccattttttcctagcaagaatcctcttttatttttactttatcctaaattaattgttggtggacttatattattaacgctgctattctgtggcgtaagtttatatggaataatagtaatactactattaacaataatattttttttaatataactataatttagaaatgttgtataaaaaatatatttgcatcttaaaaggatatatgttaatatagattttgcgagtgagacgtgcaatcgctgctagacttgatctaggagaggaaagtccgagctccatagggcagggtgctggataacgtccagtcaaggcgacttgaaggaaagtgcaacagagatataccgcctaagttttacttaggtaagggtggaaaggtgatggtaagagctcaccagcgtgatggagacttcacggctatgtaaaccccacttggagcaagaccgaatagagaggcaattaaaggggctgcccgtcccgcctctgggtgcgtcgcttgagcttactggcaacagtaggcctagatagatgattgcttaatacagaactcggcttatggcttatctcgcaacatgtaattgcaaggatttgaggaataccatatcggtattttcccttaactttcccttgctttttttgcgtacaaaacatttgtagcttcagtattcatttcttttgtcacgtgagcataaagatctgatgttatcggcattatggaatgatgatttcttccaatattcttccgaaggctatttttttgtattaatttccatgaaaatatttaatgatgttgattggtttgaatataaaggtttaaattaagtttttaagataatagatgattagatgtattttgagcgataagcattatgatgtttattgcttttttgattatttgattagaaactataaaatgatgaaaaatttaatttaaatattagggaatattacagttattaatttagaggtgaacaaataatttcaatcatcaaataaacaatataaaaatatacatagtattaatgcaagtaatattaggagttagatatgtctgatttacgtgactgtaatttatattatgatcccgattcggcaaattatttgattgagtatagagggaattttaaagaacaaatagataagttatcttatgcttgtggggatataattacaggtactatcggagtgatatctgtacgaaataatgatcttgataggctcttaaatgatgtaccagcaattgtgttttatgattttaggacaatttatgtattacaagatatctcaccatcatctgtagataatataaacaatataaagataaatccatttctagatttgaatggtaggggggtgctaataggaatagttgatacaggtatagattatttaaacgatgagtttataagagaagatgatacatcaagaataataagtatatgggatcaatccattcaaaataatactagtgacgctgtatatataggacaaacttattcaaatgatcaaattaatagcgctattgcagctaaaagaagtaatggagatccatatcaaatagttccttccagagatgaagttggacatggaacaaaagttgctgggattataggagcaagaggatataatactgagtttcaaggaattgcaaatgcaagtgattttgttattgttaagcttttcgaatctactaacttcaaaaggcaattacaagaaaatggaattccgtatactccagtatataatgcatctgaaattgtagcaggagtagaatacttgagaagagtcgcagtagaacgtaagcagccaatggttatctacctaggtgtaggaagtacagaaggtagtcatgatggtaacaacttaatttcaagatatataacatctattggaaatagtagaggattgtgcgtagtcaatggagtgggaaatgagggggattctcaaggtcatgtatcagggtatatcaggaatgtaggggatacaaaagtaatagaattaagaatcccaagagaaataagataccttccgatttacatatgggtacgaagaccgaatattgcatcaataaatgtaatttctcctacaggggaagcttcagcagttatacaatcaaaaataaataaagttcaaccagtcagatttgtttttttaaatacagatatgatagtaagattctattcaccagaacattttacaggacatcaagtaataagtcttacgtttagtaatataaaaccaggaacatggactttcaatttgataggcgaatatataacaaatggtaggtatgacatatggttacctcctaaaagtactttaccagaaaatacaatatttcttgaatcggatccatttaccactctaacaataccggcaacagctgttaatgttattacagtatcttattatggaaataataatgcactaattgcagcttctggtaaaggatttaatactaatggattgattaacccagatatttcaactataggtgtaaatatattaacaacaaaagttggaggaggagtaacaacattttcaggcagttctgcggctacagctgtagtggttggagcatgtgcgcttttgttacaatgggggattgtagaccgtaatgatccgactatgtatactaaaaaaattagaacatacataatgtatggtgctaacagaaattcagcgaacagatatccaagtagagaaacaggatatggtgattttgatttactaggtattttcaatataattagtggtttgtataggaatactaaccaaagatttagaatgaatattgctgataaaaaatatacaaatgaagattatgagtttgatgagtattatataaataaattatttataagaattccaaaggcaggagatggaaaatttatatgaaggaaggttttagagctccaataaatattttttctgatgtaaattattatcattatatagttcaatatgaaggtaacattgaggaggaagtttcaaaacagccagggtactatgcaactataattgataatcaatatgccatattatctacacctgtagagcttgatacaggtacagcggttccagttttttctactgtaatatatagagcttttccagatatatttacgctggaagaagtttcgccaattgaagcatctcaagctaattttttgcaattagaattgccattaagacttacggggagaggagtaaatgtagcgattatagattctggtattgattatttaaatgatgaatttataagagaaaatgggcagaccagaatagagtatatttgggatcaaactataaattcagggcagcaaacaggagagaatggagttccgtttggaagtgtctacaatagaagtacaatacagcaagcaattgatgcttttaatgcgggacaatctccttatgatatagttccaaccaaagacgaaataggtcatggaacaaatatggcagggataattggagcggttggaaaaaatcctaatttgaaggggatggttccagattgcgattttgttgtggtaaagcttcttgaaaatattgcttataaagcgcggtataatatacaaatacctatatacagcatgttatccgttttttcagcactagaatttttaaatagatattcactagaaaataacaagcctatggttatatatatgccattagaaagtaatctaggaagtcataaaggaaatggttttttagagcaatatatggatttaatatctcaaagtagtggaattgcaatagtaaatggttcaggaaaccaaggcgcaagtggaactcatacatcaggtacaatatctcaagttaatgaatctagaacaatacagctatatatatcgccagagcaaaaaaacataatagttgatatttgggttgaatcacctaatataatgacattaaatataatatcaccatcaggagagagtactggaactataaatgcagaaataacggctatagaaacttattcatttgtatttgaaactacttcaatggtagtgaattactatgttccagaagaatatacaggtgatcaattaatgagagtaagattgttaaatataacagaaggaatttggcgttttaccttgactgggcagtcaattctaaatggcagatttaatgcgtggatacctcaagaaggtgttagtgtgggggggactagatttatttcttcagatccttatgggactataagtaatccagcaagttcagaatacacaattactgccgcagcgtataatcagctaaataataatgttctagattattctggaatagcatttttagaggactatctcaatagaattgatgtggctgcagggggaataaatgcattaactgtagcacctaataatcaaacggctattgttaatggaacaagtgtatcagcggccatattagcaggggcttgcgctatgttatttcaatggggaattgtagaaggaaatgatcctaatatatattctcaaacaataaagacatatattcaaagaggcgcggttcaaagaagtggggatttatatccaaatccagtgtggggatatggaatacttaatgtgctaaaaatgtttcaaaatatgcgataaattgcaactccatagttatagtataatataggcacattcctttatattgtagaaatttatattttagataatttagaatccctaaagtaaatcttatgaaaggcaagtatacaaagatttaattgcataaggcaacttgaatttagggattttaaattattttttatgatctaacgaactatttttagatgaagcgtttataaaagcttcaaaaagtttaagcatatttttatcgttataagcagtcataatttcagggtgaaattgcacaccgacaacaaagtttttatcacaactttcaatagcttcaatcactttatccttagagtaagcagtaactttaaaaccaggagctaaatttttaattgcttgatgatgaaaggagttaattagagcagtatttccccaaatatcatataaaattgagccctcaataatttctaaagtatgactagccgctccatcttttgtttgctgatgatgttttatataacaaccactcatatcagataaatcttgatataatgtgccgccaaaagctacatttagaatttgatgtcctctacaaattgctaaaataggtttattaagttcataagctatttttacaagtgccagatcaaactcatctttatcagggtaaatataacctaatttaggcgatggttcttcattatataataaaggatttatatctattccaccagaaagaacgatgccgtcaagtagttcgacttgtcttctgatggattcttcatcagaaagaataggaagtataattggaataccacctgatttaattacagattcgacataatcattgccaagtgattctacaaccgagtgcgaatattgagtttcgtgtttaataactctgtttgaatttatgcctataattggtttgttcataatttgtatacctcccttagcatatatataacttataatatatatgtataaataaagattgtcaattgtgcataaatggaagaaaaatagggaaaagtcaacaatttataaacaaaatataaataaagtattaatttatatttacaaaatgaataaagtaagtacaatagaagtaatgataacttatttgttacgctctagaaagttataggattagacaatctgctaatattgtgcctcttgtgagtatagattatgaaaaagtttgattcaaaaatttacttttaaaaggaaaagatattcgcatggcagatttctctcacatatattaaaaaaggcagatgagtaaaaaatctcaggcttaagagtcgcaagcgggttggtctacatatgatgaaatttaaagtgttgaaatggcatgggggaacatattagttatgaaaaagtttttcaaaacaataatgatagcagttgttattatacaaactataactgtaacggcatttgcatatgatgaagttaataatatgaagagtatggaaaatcatatttataatcatcttgaaaatagagatactgattttactattttatatacagggggaaggtcagaatttgaagagaatataagtaattgtattaaggatgcatattcaaaagatgattatttagaaagatcttggttggaaataaagcctaaagcaaaggtaactgaaaatggtatagagacaactctagatgtaaaatacataacaactaaggaacaagaaaattatataaatagtgagttaaagagaattactgattatttggttaataaggatatgtcagagctagaaaaggtacaggccataaatgagtatatcataaatagatacgaatatgactatactcaaaaatctacaagtgtttattctgcattgacaacgtcattagcagtatgccagggatatgcaatgactgcttataaaatgtttaactatgcaggaatagaaaatagaattgtggtcgggaaaattaaggatgtttctcattcatggaatgctgtaaaaattcaaggtaattggtatcatatagatattactaacaatgattcaagtgataagaataaatactttttagttggagataatactttacttgataataattatacttgggatagggaaaaatatcctaaatcctttaatgggtattataaataagcttttatttaaagaattgtaacgcaaccttattgcttggttgaagtgtatatgaatattaaaaatgttataagtaaagcatatatctagttttcgttagtatatgcttttttattatccttttatattatttcacaaaaaagataagagagttttgtaaattctcaatatagaatataaaggattacatatagtaaaatgaatatagagaaaacattaaataaaatattaattgagataattaaggcggaaaagggaggaaatagatatggcagatttgtcactaagacatatttataaaatttatgaaggggatgtaactgcagtaaaagatttcaatctagaaattgaagataaagaatttatagtttttgttgggccatcaggttgtggtaaatctacaactttaagaatgattgcagggcttgaagaaatatctaaaggtgaattatatataggtggaaaattagttaatgatgtagaaccaaaagaaagagatatagcaatggttttccaaaactatgctttgtatccacatatgacagtgtatgataacatggcatttgctttgaaattaagaaaagcacctaaagatgaaatagataaaaaagttagagaagcagcaaagagattagatattgaacatttactagatagaaagccaaaggctttatcaggaggccaaagacaaagagttgcattaggacgtgcgattgttagagaaccaaaggtattcttaatggatgaacctttatcaaatcttgatgcaaaattaagagttcaaatgagaacagaaatatcaaagctttatcaaagtttaggaacaacatttatatacgttactcatgatcaggttgaagctttgacaatgggaactagaattgttgtaatgaaggacggcataatacaacaagttgatactcctcttaacatatacaatacgccaaataatttatttgttgcaagctttataggaagtcctcaaatgaatttaataaatggtattgttagtgaaaaggatggaaagttatattgtaaatttgatgaaaataatatattattgccagaagaaaaagctaaagtattaaaagaaaaaggatatgttaataaggaagtagtatttggtataagacctgaacatttagatgataatgctcaaataattgaaaataaccctgcagctactttaactggagatgtagaagttgttgaacgtatgggtgctgaaagttatatttactttaggtcaggaaacaacaatatgactgcaagagttgatggaagcactaaagcagaacctaaagacaagattaaattatatgtggagcatgaaaatattcatgtttttgacaaagaaacagagttaagaatttgctagtattaaattagtgacaattgaggtgatggaatgaaaggattagtgagatatttagaagaaatatatgaaaattgtgaaataccatttgaagtttatgtggacgatgaaattatatttaaggctaatcctaattcttttagcgaaaatatacttgaagatatgttttttattggaccaaaaagtttcaaaataaaaacagaaggaaatcgcaaggatttcataatgatattagagttttgtataaaggataggtataaagatagctatagtaagaaagaaaaaatagtttctcagttattacaaggcttaagtgtatctaaagaaaagattaaggaagttatgccaccaataaaagaagaaacatttttagttactttaaatttaaaagaaaaaataacagaggcattagaggcattaaaaaatgtttataataataatgatgtaacaattcttatatttgaagatacaatcattttaattggaatttttgaagatataaaggagcatgtatctagtataagtgaaacaatatacttctcgctttacgaaaagtgttatataagctattgtcatattggggactatgaattattgaacaagttgtataatgaaaatatgtataaaatcaatttagctaaaaagtataatgtatctcaaatggtatttggatgcaacagccttttatttgaagaagttatggataatttaaatcaggatattaaggaaaaaatactaaataactttaatgaaagtttttcaaagttagatgaagatatgttaaaaactatagaggttttctttaaatcagacttaaatttaagtgaagcttcaaaaggattgtatgttcaccgaaatactctaatttataggttggataagatacaaaaatatacaggctacgatataaggaaatttaatgatgctgcattatttaagatagccttctttatttggattcaaaagaataaaatttaatagatatagctagaaatcttttctgaggattgttaaaagtaatcttcagatgagattttttatttttagtcatataaatgtaaacaagtaagaataaataaaaaatttgttgttttataagtattgctattacaaaatttggttaataagacagctattatgtaatcataaatagaaaattaagaaaatataatataatttcaggaatttattgtataaatattccgcgtttgttaaaatgttattaaagttaattaaataactggattgttatataaacatgattacgaataaaacgaatataatattgtatgcttaaatatctatttaatcaaaatttttgaattaacaggaaattaaggtaacgataccgaactattataatttaatagtgatgcaggagataaatatgaatataaaggatatagcaaaattagcacaggttggagtcagcactgtttcaagagtattaaataatcatcctgatgttaaagaaagtacaagacaaaagattttggaagtaataaaggaaagcaattatatacctaataatagtgccagaatactaaaacaacaaaatacaaaaaatattggggttctagtaaaaggcgtattcaatccatttttttctcaaatgattaatgtcataggaaatataataaatgaaaatggatatacaatgatattgcatcaaaatgattataagaatgaccaagaggttgaaactttaatagcatttataaaagaaaagaaattacaaggaattatatgcttaggtggtaattttgttgatattacagatgactgttttaaagaaataaatgttcctatagtattaacttctgtcaacactgtttcaaagcaaggcaaggaatattattcatcggttggtatagataatgttaaaagttcatatgatgcaacctcatatctaatagaaagaggtcataaaaaaatagcattaattttaggggaagctgatgatataggagtaagcatattaagaatgcaaggatataggaaagcattagaaaaaaataaaatgaaagttgatgatgatttaattattgttggtgggtattcaagcagaggtgcatacaaggaaacactagaattattgaaaataagaaaggatatcactgcgttttttgctctttcagatattatggctataggtgctgctaaagcaattcttgatagtgggttaaaagttcctgaggatatatcaataatcggatttgatggcatggatgaaagtgaatattataatcctagtataacaacagtaaaacaaccggacaagctaatggcaactatgagtataaatttattgatatctcagattaatgaaaaaaaagaaaaccaacatatattattagaaactaagttaattgagagggattcatgcttagatttgttaaagtaatggttattgatatctaaagaatattaaaaagggaaataatatatataataatttgagttagtattatattcctagagggtggaggaatgagaatgaaaagaggtagtggaatcataatgcatattgcatctttgccaggtagatatggaataggaacatttggaaaagaggcatatgaatttgcggattttttgaagaaagcgggtcaaagtttttggcagatacttcccttaggacagactagttatggggattcaccgtaccagtcattttcggcatttgcgggaaatccttattttattgattttgatattttagagtctgaaaatttgctaagaaagtccgattatgatgaagtaaattttggtgataatccagagcgtataaattatgaagtgttatttaaagaaaaattgaaagtattaaaattagcatatgaaaattttaagcagaaagaatctgaggattttaagaattttgaaaaagaagaatatatttggcttgatgactatgctacatttatggccttaaagaataagtttgacctaaaaagttttcaaacatgggatgatgatattaaattaaggaaaaatgatgttttaaagaaatataaagaagaacttaaaggtgaaattcaatactggaaatttgtccaatacgaattttttaaacaatggacaaacttgaaaaattatgttaataaattaggaattaaaattataggtgatatacctatatatgttgcagaggatagcgcagatttgtggagtaatccaaaagtatttttggtagatgaagaaacattaaccccaataaaaatttcaggctgcccacctgacgcattttcttcaacggggcagctttggggaaatcctatttataattgggagtatttggaaagagaaaactataaatggtggataaatagaatcagaaagagcttagagctttatgatgtaataagaatagatcatttcagaggctttgaggcatattggtccataccttatggagagagaacagctgtaaatggagaatgggtaaagggaccagaaatgaaattatttaaggcaataagaaaagaacttggagatatagatattatagctgaggatttagggttattaactgaagatactataaaatttagaatagagactggtttcccaggtatgaaagtattagcatttgccttttcaggtgattgtgaaaatccatatctgccacataattatgaaagaaattgcgtggcatatacagggactcatgataatgatactataaaaggttggattcaaacgacaggaagtaagaatgaagttgagaatgcagttgaatatttgaatcttacagaaaaagaagggtataattggggatttataagaggaatatggagcagtgttgcagatacatctattgcacttatgcaagacttcttaaatcttggaaatgaaactaggataaatttaccgtctactattggagaaaattggacatggagagcaaaagacggtgtttttactaatgagttagcaaataaaatatatagattaactagaatttatggaaggtgtgagtaagtgtggataaacaaagaataagagatggtatagaaagatatttaaaagtaaaacatgcagtaaagttgaaggatgctcaggattatgaaatttttaatgcgctttcattaactattttggaagagataattgataattggaatgaaacaagtgaaacttataataaaggaagaatggcatattatttatcagcagaatatttaatgggaagagctctaggcaataatttaatgaatttaggtttatacgatgaagttaaggatgttttaaaagagttaaatatagacttaaatagaatcgaagaaatagaagaggatgcaggacttggtaatggtggacttggaagacttgcagcatgttttgtggaatcagcagcgacattaaacatgccattggttggatatggaataaggtacagtaatgggttatttaaacaaaatattgaaaatggatttcaaactgaatgtgaagatacatggttaaagtatggggattcatggagtgttagaaaagatgatgaaattcaaataattaaatattcagatatgacagtaaaagcagttccttacgatgtgccgataattgggtatggaactaaaaatataaatactttaagattgtggcaatgtgaggctttaagagaatttgacttcaatttgttcaataaccaacaatatattgaagctgtatcagcaagaaataaagcggaggatatatcaagagtattatatccaaatgatacagcagaggcaggaaagatattaaggcttaggcagcaatatttcttctcaagtgcatctatgaaagatatactaaaaaaacataaggctaaatttggagcagacttttctgaatttgtaaaatacaatgtagcacaattaaatgatactcatccaacaatatcaatccttgaatttataagaatattagttgatgaagagtatgtagaattttctgaagcattatcaatagctaaagaattttttggatatacaaatcatacaatacttgctgaggcgctagaaaagtgggatataagattaatagaaagattattcccaagaatacttcaaattgcataccaagttgatgaagcattgatgaatgagctaagacaaaagggatatgacgaaggtgcaatatggaatttcagaattgtcgcaaataatcagatgagaatggctaatttagctatatttgtagggagagctgtaaatggtgttgcagcacttcatacagaaattttaaagaagaatgaattaaatcactggtatcacttatacccaaataaatttcaaaacaaaactaatggaattacaccaagaagatggcttaggctctgtaatgcagaattatctgagcttattacagatttgttagggagcgaagaatggattaaaaatttagaacttcttaagggactagagaaatttaaagatgatgatgcagtacttgagagacttatggaaattaagtataagaagaaaattcaattagcagattatattaaacaagaagagggaattaatatagatccagattcattctttgatattcagattaagagattacatgagtataagagacaattactaaatgctttatatattttagatttatattacagaataaaagaaaatccaaatttagacatgccaaaaacaacatttatatttggagctaaagcattcccaggatatagaagagctaaggggattgtaaaatttataaatgaaatagctagacttatagataatgactcagaagtttctaagaaaataaaagttgtttttgttcataattatagggtgtcttatgctcaaaaactattcccaggttcagatttatctaaacaaatctcaactgctgggaaagaagcttcaggaacaggaaatatgaaatttatgttgaatgctactccaacatttggaacttatgatggtgctaatatagaaattgttcaagaaagcggagaggaaaataactatatatttggacttagagtagaggatattgaaagaattaagcatgactatgatccaaaatggtattatagagagaatccaagtattaagagagtgattgatactttaatcgatggtacattagatgatggaagaactggatatttcgaagatttatataatgctctgttagaggagagagatcagtattatgtacttgcagattttgactcgtttaagcagactcaagaaagagtgtttgaagattataaggataaaaagaaatgggctcaaaaatgttttgctaatctatatagttcaggaacattttcaagtgatagaactataaagcaatatgcagatgagatttggtatataaaacctgtcactattaaatagttattaatttaaaaataaaataactaagagttatggatagagaaaactttatatccatagctctttacttttttacgtattatagctatttctaattacttaaaatcagtttttagtatatgaatgcggtgttgggtgagttgcaaaataattacgtataagtttacatttaaatttgtttacggtattattaatatagaaaaataaggcatgtagtcataaatttagcaagcaaaatcataatttttgagaatttcttttttatcattatagagtaaatagtattattttgaagttggaaaaggagattgaatatgaagaaaatagtagtattggatggaagaactttaggaaatgtagactatattaaattaaatgagtttggtcaggtgatttattatgatttgacatctgaagaagaagttgcagaaagaattagagatgctaatattgttttaactaataaagttaagttaaacagggggaatttaaaagatgcgagcgaattggaattaatatgtgaaatggctacgggatataacaatatagatatagaatacgctaaagaaagaaatattgcggtaactaatgtaagaggatattcaactacgactgtagctcaacatacttttgctatgttacttcatttatacgataatataagctattttgataactttgttaaatctggagagtactcaagatatgatatgttcacaaatttagaagcaccatataaagatttgtgtggtaagatatggggaataattgggcttggagccattgggaaaagagtggctcgaatagctcaagcctttggtgcaagagtagtatactattcaacttcaggaaaaaattcagattcagactttgcaagagtcgagtttgagtcattgttaaagcaatgtgacatcatttcagtacatgctcctctaaatgaaaaaactgaaggattattaaattatgaggcttttactaaaatgaaaaaagatactgttgtaattaatgttggaagagggcctataattgtggatgaagatttagctagagctttagatgaggagataataggtggtgcagcgctggatgtatttaaagaggagcctattctaatagaaaatccactactaaaagtaaaaaacaaagataggttaattctaacacctcatgtagcatgggcaagtgaagaagctagaagtagattatttacagatttattagaaaatataagcgcgtataatagaggagaaaaaagaaatagagtagatatttaacgattatcaatttaggatgagtgataagaataaactagtaaaagcttaaataagcgggaggctttaatgaaaaataatagggaaattttttatggaacgtcggcactgagattttataacaaaaaagatgttatgaatggaaaagttataaaaataaaccctgcattaattactatactggataaattagatgaatcacttgatattgatacaattcaagataaggtaattgaggaagtagaaattctgctaaaacaaggtaatataaaaacattacatgtggatataaacttcgatgattatagtaattttggaagtgatggtccaagtattaattctcacatttttaacataagctttcttgaaagattaaatgagatagctggattacatgatgtatttttgaatatacatttacttacggattatcctaagattcatataaaagatatcaaacacataaatgttggagctgtatgttttcaactagaagtagtgagagatcgccaagaattgaaggcaattatagatgaaataattgaaatgggagcttgcgtaagtcctgtaattgaggttgtcggaacagatggtttcattccaaaaactaagaaagagatactggaatttatattgccatttcaagataagattggaatgttaacatttcaagtggaggctacaggtgcacgttcaagcaattcatttggaatgttgaattcgaaggaaatagcagattatattaattattttactagaaactttgatggaacagtgcagatgcaaggtggaattactactgaaactataaggtcagccattaaattgggaagtgagtttttagtatgcggtacagaaatatttaataataaattaggatattcttcaatggaagttatagaaaacatgcttaaagaagcagataaagcattgtgtattgagagaaaagaataagttaaaatattatgagttagaaaagcttgaataatttagatgtaaggtataaatgatttgttcatttataccttattttaatatgtgaaggaaataattaatatgagagtatttgtctatttttgatacgtgatattcgcataaagaacttcagctggttttattttttgattagtgttaatatatataagtgctacaagtaataactaaggcacctgaaaggaaataatagacctaaagtgcagaatatgcaggtatgatggtccattatttttttaattgtgcttaaaggaggataataaaatatatcatggcaaaagttattattgcggaaaaaccatctgttgctaaaaatattgcagatgcatttaatgtaaagactagaagagatggttattttgaaggaaatggctattacataacatgggcgtttgggcatcttttacaattatatgatgcaaaagactatgatgaaaatatgaagggatggaggtttgaaaaatttccttttattccagagcattttttatataaggttaaatgtgatagtgtagacagaactgttgaagataagggtgcaaagaaacagcttggaataataaaggctttaattgataaagaagatgttgatggaattgtatcagctactgacttcgatcgggaagggcaggttatagctgatgaattgtttggctactttaaggtgaaaaagcctatatatagattacttttaaacgagtggacacctgatgaagttaaaagtggaatggaatcactaaaagataataaggaaatgcagccactgcaagatgctggaataggaagacagtggagtgactggattattggaattaatttaacttctgtaagtacactgaaatataaatttgaagaaaacaagactattaatataggaagagtgcttcttccaaccttaaagattatttatgatagagataaagaaatagagaattttacagcaacaacttattataaactagtatcaaacttcaaaacttcaacgaatgaagaatttgagggactttattatgagaatgattctgaaaagttcgataaaaaggaagatttggataaatttatttcaaggcttgaaggagcaactgctaagattactgataagcagacagaattaaaaaaagaatatccaccatacttatttaacctatctaatttgcaaggacatataactagtaagtataagggatggacatcagataaagttcttaaagtcgcacagtctctctatgaaaagaagcttactacttatccaagaacggcaagtgtggttttagaagaaagtttaaaggatagagcgaaaaaagttttagatacattaaaagttggattgccatatgaaaaagatattaaatttagtacatccaaaagaatttttgatagctcgaaagttgaaagccacagtgctataacacctacatatataaagccatcgggtttatcagctgatgaaaaaatagtatatgatgctattaaaaatagatttataatgcaatttatgcctatagctgaatttgaagaaacaaaagttacattaaaagctaatgtttcagaaatgaatggaatttttgtttcaaagggaaaagtaaagcttgtagaaggttggaaggtagtagagaaaatagaaagtaaagatgtcattcttccaaaagttgaaatagatgaagaagtagatattataaattctaaagtgaattctgttactaaaaagcctcctaaatatcatactgaaaaaacattacttagagtgatggagacttgcggaaaaggtattgaaggaaaagatgaagactcagaagaaatgatgcaggctattttaagtgggtttagcataggaactccagcaactagagcagaaacaataaagaaattaaaggatataggatacctaaagacaaaaggtaaaaatcttatgtgtacagagcttggtaggaatttggttgaaacttttccggtaaaagaattatttgacttggagtacacgggtagattagagaaaactctttcggatatagagaaaggaaagtttgctaaaagtgactttattaaacttataacagatttcacaatccaatctgtagagttgataaaaaaagatgatactgcattatcaagatttaaagtagaaatacctaaggatagtgagaatataggaccatgtccagtctgtggaaatccagtaattgaaggtgaaaagagttttggatgcagtaattggaaaaatggatgcagatatacgatttggaaagatgatagatatatagcatcattcggtaaaaaaatatctaaagagatggttgaacttctgcttaagaatggaaaagtaggatttagaaatcttaaaagcaaaaaagggaatacattttcagcatatttcaaatatgagaaaaatgaggagagtggatactttaattggaagattgaatttatagacaataagtaatttagatacaatcaaaaagtaatatgaaatttaataaaaaaacagatattaattcaatagaattaatatctgttttttggtatctaatataagttaaggaaaaattaaggaaatataaattgataattaatatattttagcctaaaatttaagtgtactaatagtaatagtacacttggagaaatatgagattaaaatgacaaagtttagtggtagtaagaaaattttaaaacaaataataggcaatatattaaaagctattaatcatgtaatgtaaggggagaagaattttatgaaaaaatttatattgaataaattgcttggaatactggttatgatttgtacattaattagtataatgccgacagtatctaaagcagaggaaaatgattcaatcaagatggatgttgcttatggtattgaaggaaattttaaaggatcgattggaatacctataaacgtccaattggagaataatggagaagatataaatggtgaagtggaagttagagttccaactaatatgcctaatacatacgatgcttttacatcagaaataaatttagcgtctaaggagaaaagaacagtttcaattcctattaacttgccagaaaattcttcaaaaatatcagtagttcttaaacaaggagaaaatattttaaaagagaatacagttattctaagcagcggaaggattaatgaagctgatatgttcatgggggtattaactgatgattttaatggacttagtataagatatttagatttcactgattcaaataacaaaagtaaggacgaagagaggataaataaggctgacagtgtacctttagctatagagcagctaaagagtaatgcaaagaatatttcctcgttagatgtaattataattaataactacaatatgtcaaatttacagaaggaacaatatgaaaatttatctgaatgggttgataatggaggagtactagtaataggaagtggagaaaatgcttccaaaacagttggcaatataaataaagaatttatagatgtaagctataatggaatgaaaaatataaataattatactgtagctaatttaagttttaaaaatgcatctactgtattgcaagatggaggagagccattaatatataaaatggataaaggaaagggaaagatatatgtttcgacctttgatttaggaaaccaaaatattgctcctaaagataatgtaatgaagaaatggaaggatttacttaaagatgattttctaagtaaatataaaaattcacatagacatggaaacaacgtgccatatcagatagaagagttgagccgcaatgtacctactggtgatatttttaaaataaataaattaatgatagtttttctaatttatgcattatctgtaggaataatagtttattttgtaatgaaaaaactaaataaaagagagcagctatggggaatcattcctattatagcagtaggtttttcaatattcctatatttcattggaagtaatacaagaattaatgatattgtattaaatcaagtaaatattattcaaactgacaaaagcgggacaagcgatgttgtagggtatttagggattagttctaaatataaaaatcagttaaaagtacaagagccttctggaacaaatcttcagaattatagcaatgagcgttattctgacagagatcaggggaaaaataattttacaaaattagctagcaaaactgtatatagagaaaatgattcctattacgattttaaagatttggcagcattagatatgaaaaagtttggaatttcgggacataaagaaatagttccattaattgaagcaaacttaaattatgactctaagaagctaaaaggaagtattaacaatactttaggatatgatattaaaaagcttttggttgtttcatctaataatgtttgggatttaggagaagtaaaagcagatgaaaagctaaatgtggatgaggataagttttccgcagttgggctagcaggatacggtgataatttagaagatgattattttaaaaattatgtgcgtggcaaaaataaaggagatattaaagagcaatataaaaatgtacttagaatgagctcactaatatcaacaataggagagaataatatttccaataaatcaacatttttagttgcaatcactgatatgccgatagactatggatttgattttgaaaaaaaatcagtatctaagtatgatactactgcaataattcaggatgtagatatagattttactgatagcgaaggaaacttaaattatcctctaggatatttccaagctgatataactcaatcagattcaagtattcatatggaaacttcgcgaaatgaagtttatggaagtggagatatgatacttaattattcaatcgataacaacatagatatcctagatcttaaggttggatatataggaaataacaagggtgcaaaattcaaaggggatatatatatttataattatgaaaaaaatgattacgataagattaattacactgctaagggtgaaagtttggggaatatgggtaaatatgttaaggatggaaaggtatcaataaaatttcatgggaatgatgaagaaggtataggaattccacaaattgctgtaaaggggagggctaaataatgctggtaattagagatttggaaaaaacatatggaaaattcaaggctcttaataaattagatttagagataaagcaaggagagatatttggttttataggaccaaatggagcagggaaaagtactactatgaagatagtatcagggctcctatctcctgatagcggagaggtatatgttgatggaatggatgccattaaaaataatagaaagctaaaagagaaaatagggtatatgcctgatttctttggagtttacgataatttaaaagcctctgagtatttagaattttatggttcaatttatggaattacaggtaaagaaattagagatttatcaatggatctattggaactagttaatctccaggataaatataatgcatatgttgatggtctatcaagaggaatgaagcaaagattatgcctagctagatgtctaattcataatccgcagttacttatattagatgagcctgcatccggtatggatccaagggcaagatttgaaatgaagaatatattaaagaatcttagagatatggggaagacaatattagttagttcacatattttatctgaacttggtgagatatgtacaaatattggggttatagaaagtgggaaaatggtatgtcaagggactgtagaagaaataatgagcgctgtaagcggaaatcatccaataattattacagtgacagaaaagactcaagaagccattaagctgcttaaggaaattccaagtgttggaagagtaaagggtgaagataacagaatatcaattaattttagtggaaatgatgaggaatgtgtgaacttacttaaaaatttagttataaatgatattccaatagtctcttttaatagggaaatgaaaagccttgaagatattttcattaagataacagataagaatgaactaaaggaggattagaattttgagaataaatccagttttaaaaaatgaaacaaaacttgctgtaagaagctttaaatttaccttaatgatatttttctatgtggctgtactaagtgcaggagcactttttatatttaatgttaatattgaagaggcgtattttagggggataaacttagaatctacagtgtacttctatattggaatggcggtaattcaggcaattctattaatgtttattgttccatcattaacatctacagctatttgtgcagaaagagaaaagcaaacgttagaagttcttttatcaactaaaatgagtacattatctattataattggaaagttattagcatctataagcagggttataattttaataatttgcactatgccaatatattcaattaccttcttaattggaggggtagatttaggaaacataatagaactaagtcttttctttatagtaacaacaatttttgttggctcaataggtgtttttatatctacatgtataaagacatctaaggcagcaacggcaatagcttatggcgtagtattatttatttttgtaggaatagtaattttaggctatataagcatgttccttactgctaacgggagcactaatgcacaaaatataagattgcctattttctcttatttaagtcctactattggctttgtaggtttacttattaatcaatttggaaatttagacgcttttgaattctttagaatgggagcaggctctgatatatttgaaaaaggggctatcatatctataataatacagataatattaagcataatgttaatcttaggagcagcatacaagctaaatccattaaataaaggaattagatttaagagaaaaaataacaaatattcaagcagtcaagcagtaggatatgagaataaataattatattatttacagccaaattgctcaagactaaaaaggagaacttatggatattttagataaaaagatattagagttcataaaaaaatctggacggagaataaaactaaattttattataaataaagtattaatggggcttcaggcctcattagttttagtagcaattatcttaatgatagctttatttataccttttgaaaattgctataaagcaagtggtttagttatatcggcagccctaataattagtggtgcttttggaattatgaaagcacctgataataagaaaatagcattaattgcagattcaaaaggattggatgagagagtaactacggctttagagctaataggagataatggtgaaatagcaatagctcaaaaagaggatacaattaaaataatacaagcatatgattttaaaaagaatttacctataggagtagataaaaaagaactatataaaattttagtattaacagttgtgtgttttggaattattatagtccccacaagtgctaagaaagaagctgaaaatctaagaaaatttaatgaaatcaaaagtgaaatttcaaaaaaaatagataaggaagaaaagaaaatccaaaaagaagacaaattatctaatgaagaaaaggaagaattaaaaaagatattagaggaaactaaaaaagaattaaaagagacaaagagacaagaagacacagataaattaatggatagattagaaaaaaaatttgattcacaaaaagaaaaagcagaatcagaaaagggaaaagaattagttgaagaattaaaaaagaacctaacagaacaacgaaaaaatgaaaagaaacgtgaagctttgaaaaacttaaatgaaattaataatagtttaagtaagaacaaattaggtaaagaaattatggataccatgaaaaatggagacaagcaggcgctagaagataaattgaaggagttaaataaatctttagaaaaattaagtgataaagataagagcgaactttcaaattcattagctcaggcagcagcaaatttaagtgatgaagagttaaaagagctgttgcaaaaagcatcagataatgtactagatggggaaattgatgcatcagaacttgcagatgctttggcatcattaaataataattcaaatggtggaagtaatcccgcaaaaggaaatggatcaaacttaggtaatggaagcagttcaggttcaggagcaggaaatggcagcggttcaggaacaggcggaagtggcagtggaagtggatctggagcaggaaatggcggaggctggaatactggaagcaaaagcgggaaagaaaatacctctagtcctagaagcggagagcaggtgtttattccaggaagagaagttggaagtgatgctaatttaaaaggaaacaaaaataatagcggcacatctcaaagtatagaaactcaaagtggattaaatattggtggagaaaagaaagactacaatagcataataggtgattacagtaaagaggaaatagattctatgaataactcatcattgccggaaaacttacaagatgtagttaaggaatatttcaacaatattaagtagagatgtgttagaaaatattttgaatttgattaggaagggtggtgagttttggtaagaattaaaaaacataaggcacaattattttatttcatgtgtctagattcttgctgaatataacttatgaatataaatgaagaattaataaaagatgtggcggataaattagaaaggtgccagcgtgagattgcaaaagggattataggacaagaggagataattaagagtgttttaattgctattttctcaggaggcaatgttttattggaaggtatgcctgggcttggaaaaacacagctagttaaaacaataggaaaagttttaaatcttagcttttccagaatccaattcactccagatttgatgccggcagatgtggttgggacaaacctagttataaaggagaatgattcaactaagtttcaatttgagaaaggtcctgtttttacaaatttactacttgcagatgaaattaacagggcgacacctaaaactcaatctgctttactagaagcaatgggtgaaaagtgtgtaactgtaggtaaaacaacttatgaactgcctaagccctttatggttttagcaactcaaaatccaattgagcaagaaggaacatatcctttaccagaggcgcaacttgatagatttcaatttaaagttaaagtagaatttccgaagcttgatgaattaatgaaaataatggatttaactttatctaatgagactgtttcccttgaagctattttaggagacgatgaaattcttgaaatgagaaagataatttcagagatacctatggcagcttcagtaaaagagtatgccttaaaaataatacttgcaactcatccagaaatggaagagggacatccgttggtaaaaaaatatgttgaggcaggggcaagcccaagagctgctcaaggactatttagtggagcgaaggttagagcaataatggaaggcaggcttaatgtttcttttgatgatattaaagttattgcatatccaatactaagacatagaattatattgaattttgaagcaattacagaaggaataactgaagaatttataatagaaaaaattcttgaggatttaaaaattgtataaggcacatgaaagaaaataatagaccaatatacttggctatttcctatgcctaagataaatgtatagttccaattaattgataattaaaggttgtggaaaaatggaagagagaatttttaatgaggacttttttacaaagttaaataagataaatttaaatgtaagtatgagattgtctaaaggggcccaaggtggaagaaagtctaaagcaaaaggagtatcagtggagttttcagactttagagaatatgctccaggagatgattttagaagagtagattggaatgcttatggaaggctagataaattatttattaaggtttttatggaagaaagagaaggtatttttaatttcttcttagataaaagcaaatcaatggactatgggaaaaacagcaaaaagattaaagcccttcaaattataggagcattaagttatattgcattaaataatttagatagagtttatataaatgttgcagaagatgaacgtctctctcttttacgtggaggaacaggaaagaaaggcttccaaatgattttaaaggagcttgagtcagtagaatttggtggaactacaaagctttctaaggctattactaaaagaaaaataactaataagggggtaagtatcattgtctcagattttttcaataatgaggggctggattccatagaacaaggattaaagtacttagcctataaaaaacaacaaattgttctggttcaaatattagcagaggaagaggagaatccatcccttgaagatgaggttactctaattgactgtgagacaaaagaaaaaataaaattaaatcttaactataagttaatcgaagcatataaaaaagctttaaaagattttaataataaactgggagaattagctgttaaatatggaggaaccttaataacagtaaatactaataaaagcttggaagaaataattttaaatgattttggaaagaagagagtgatttattaaattagagataatggatgtgttagctaaattagttgacacagtattatatggaataagtaagtatacttatctattatttctggattgtgccttaactagaaaacctaaaaggaggaatagaggatggggatagggagtctttggccattagcgttgttagtaacgattcctttaattatcttactttacatattaaaaaagaagtataaagaagttgaagtatcatcttcactgctatggaaagaggcttataaaaacacacaagcaaacactccgtgggaaaaactaagaatgaatataatgatgatacttcaaattttaatagtcatgttagtgatttttgccttaatgaatccatttttaaagtttggcggcaaaacttacaaaaatttgatagtggtagtggatactacagcaagcatgagcaccctatacgatggggagaaaactagacttgataagggaaaagagatagttcataattatattaagtcaataaaggaagatacaaataattatatattagcttttaacggaacgactaatttagaggggaagagcaatatagatgaagctgttcaaacttatggaagtggtgatataagtaattcgctatcatatataagatctctaggagaacagttagaagattatgaagttttagtagtaactgataagaatattgatttaggagatttaaatggtaaggtaattactttagcaaatagtggggaaaatgcagctgtaacaaacttatctcataaatttatagataataagataaaggttatagctacaatctcaaatacagggaatagtgattatagtggcgatttttccttatatgatgaagataatttattaaaggtagactctttagagctatctaaaggtgaaagtaaaacattaaattatgaacttcagaatttagaaggaagttatttaaagggagagttatcaaagaaagatttgatagcgaaagataacacttactatgatgtaattagcagtgataaaggaaaaaagatactactagtaacagatcaaaatgtttttcttgagaaaagctttaacactatagataatgttgaattatataagacaaatgatgtaaataacataacagaagattcctatgatttatacgtttttgataatgtgatgccagaagctatgccgaaaagtggaagtatattattgataaatcctacatcaaatgaattttttaaagtagaaaataaagaagaagttggacgagcttcgggagtttcagaagaactatcaaagtatacgaaaggtcttgagtttacactttctaattataagaaaatagagatgccatactttggaaaagcatttttaaagataaatgaagatacaattggtttttggggagaggaaaatggaagaaagattggagctttaggctttgatattcataatagtgattttgcactaaaaaaagaattcccacttttaatacatgaattagaagaaaaattgattgaatcaggaagtttatataaaaataattttaaagcaggagaagaaattttaattaagggaactcctttgagtcagaaaattcaagttaaggctccaggcaaaaattacgaggagattgcacaaggaacaagatataatagtatttcagaccttggtttatataaaatcaaagaaacttttgaacagggagatagcaaggaagcactattttctattaatttcccagcaagtggggaaagtgacttatctcaagaaaatattggagaagttaataatttgaaggatcagatcaaaattctaacgaaagggttaagtttaattccagtattattgatgttagcattaataggattgttaactgagtggatattatacttaaaaggtaattagggcattcaaaaaaataataagccaatctaccaagcctattttacctcatactgcgttagcagattgctctaataggcctgctatgagaccaatctgcttccttgcctgacgaaaaataatcatggcatttttgacttattattttctttcatgccccttaggaggagattatggatatagaaataacaaggatatatgcattactattgataccaataattttagtatttatgtatttaactctaaaaagacttaaaggtatagtaagaaaggacaagttgattttaattagcagaataataatcttaatgcttatagttataggaatttctgatgttactttgaatctaaagggaaggaatacttgcacagtttttttactggatgtttcagatagcatgagcaattttagaggcgaaggaattaagtttattgataatgcattaaaagaaatacctaagaataacaaagccggagtaatagtatttggagataatgcttctgtagataagttcatggataatagtaaagagtataaagaaattaaagctgcgcctatagtgaattctacgaatattgaagatgctgtcaatagttcaattggattatttgataaaggttctgctaagagaatcgtacttattacagatggggaagagaaccaaggggatttattaaaaagcattcctataatcaataaggaaaatatagatgtaaaagtatataaagtcgataatgctataggtgatgaagcatacgtagaagaagttaaagttccagataacatttctattggagaagaattttcggtaattactaaaattcaatcaaatgttcaaactaaagcaaaattatctttattctcaggaagagacaaaaaaggcgaacaagaagttcaattagaaaaaggaagcaatacctttgtgtttaaggatgtacaaactacaggaggctttaaatcctatagggttttgattgaaccagaaaaggatagtaataaaactaataatgaatatagttgttttaccaatgttatttcaaaacctaagattttggttattgaaggcagtcaaggtaaaagttctggcgttttagaaaccttaaaggcagctaacagtgagtttaatgtaatattaccagcaggggcaccaagaaccttaaatgaacttttagaatataaaactatagtgctgtcagatgttcatgcagatgatttaaacaaaggtttcatggacaatatagaagcttatgttaaagattatggcggaggggtagttacttttggaggtgaaaattcctatgcattaggaggctacaaagatacctctttagaaaaaatccttcctgtaaacatggataagaaaggtaaaaatgaagtcccacagataagtataagtttagtaatagataagtctggaagtatgtccggtggtgacgggagtgttagtaaacttacattagctaaggaagctgcaatgaaatccttagacaatttaagagctactgatgaaatcaatgtagttgcttttgatgataaataccaagaagtagttgaaaggcagaaggcagcagatagagaacagattaaaggaatgattgcaggaataggagaaggtgggggtacatcgatttacccagcattggaagaggcttataagaatcaatctgaaagcactgctaaaattaaacacatcatacttttgacggatggacaagataatttcggaataggtaattatagtgatttacttggagatataaataaagcaggtataacactatctacagtttcagttggagaagatgcagatagtcagctattagaacaactagcggagatgggaaaaggaagaagttatcatactgataaatacactgatattcctagaatttttgcaaaggaagtactcttatctgctggtacttatattattaatgaagaatttacacctaaaatagtaagtaatcatgagattttaaatggggtgatgggagagaattcattgcctactttacttggatacgttggtacatcaattaaggataaagctatagaaattttatcatccaatcatgatgaaccaatacttgctgctaatcagtatgggctaggcaaaactgtaagctggacatcggatattaatggagagtggagtggtaattttttaacttggagtaaaggagcacagctagtaaaaaatgctatctattggactattccagatcttagtgatgaaggaaaggtgtctataactcaaagtggcagcgaagctgttgtagagttttacagtgattcagttaaagatgggtctaaaattaaggccgtatacaatagtgaaagtggagaaaatggtgaattagaattaagtcaagaggagcctggaaaatttgttggaagagttaagctgaatgattttggattctatactttcaatataagagaagagaataatggagaagtattaaataattacaatggagctttctcatttcagtattctgatgaatataaatttaataaaaacaaggataaaatagatacactagtaagtgaagtaaaaggaagtttcattaataaacctaaagaagcattcacaggggaaattaaaagtgcatacaaacccgtaaacttaacaatcccagttttagtcattgctatattcttattcctttttggtataacatatagaagacttaacttaaattttgataaatatttcaaaagttttgtaaccagatttaatgatcttaaagatcaaaaaagtttaaataaaaatctttctaatcaaaaaggaaaaagtgcaccttgggatagcaaagatgataaatcttcaaatgatctcaaacacgacagtaatttaaaagataaacaaaatacaagtgcgaataaagaaaaagatataaagaaagttaaagaagacagcatggatagaggaaagcaacaaagattagatacatctacattactaaagaataaaaagcaacgggaggaataatatagggtcacgcaataataatcgaacgtattagtatactcaacgaaattgaatacatgtttattccataggactatgaaaataagctgaaaggttctaaatgcatggttgcaccatttctgcctgatcacaatttcattgtaaaaagcagtaaatggaacaactagccattaagaacctaataagactattttcaaatgcttatttcacaaacatgtactaattcctggtttgaacatactttaagttctcattgaggaaccctagataggtatccaacacttaagttttgatttataacttaaaatatattccacactagaaagaatgggaactcttttgtgcagtgtttcattgagaatttgtctgtaggatttcttcagcagaagttgttccatttgagcttgtcatttgctttccaaaggagcatgatcgaatgggcgcaacttctgctggtagaaatccacaggtaaattctctagaaaccgaaacaacagagtacccattctttcgttgagttatatgcataagtttaagataaatacacatactttagctgcttaccatagttccaccatttacatgaagtacttgtccagtaacataggaggagtcattagatgcaagatatacatatgctggagccaattcgaaaggttgtccagctcttttcataggaacgtcagatccaaattttgcaacttcttcagcagaaaagcttgatactataagtggcgtccaaattgggcctggagctacggcattaactctaattcctttggttactacggattgagaaagagaacgagtgaaggttacaattgcgcccttggttgaagaatagtcaattaaatttttactaccttggtaagctgtgacagaagcagtgtttacaattgcacttcctcttttcatatgtggtaatgcagcttgtgtcagataaaacattggaaatatattaattgaatatgttgtctttaattgggaagatgatatctcttctatgctatcttgaggaaattgaacaccagcattgtttattagaatatcaatcttgcctagtttgtcaattgtacattcaactagtttgatgcagaaatctttgtaggcaatatcaccaggcatgagaatacatcgtctgccatatttttcaacatattccttggtctttattgcatcttgatgttcatacaaatatgaaattactatatcagctccctctttagcaaaagcaacagctacggctctgccaattccactatcaccacctgtgattaatgctactttatcttttaatttgtcactccctttataatcaggattatcaaatataggaggtggatccatacgtgcttcaattccaggttgacaatcctgatgttgtggaggaaattttttaggtaatttatcaaagtctatgtggtttttgtattttaagggcatagctttctccttgaatatctttatactattaataatattatggatttattaaactatttgtgaatgaattaatcttggaattaaatgagaatgtaaaaataattataacaatccatgcatttcaaatgtatatatattaaatttgtatatattgtgttataattaataaatatttacataggcaaagctgtctcaaaattaattatttttttgagacagcttttttatttctatcaaagaataaagaatttatctcaattaaaattaaaaaaataagaaagaaggctggtataaaatgaaaagatatgaagtaagtaaaaatggaaaattagaaaatgtagctgatgctttttcggaaatatatagtgttgaacttttgatgaaagaaaagcctgttatcttggaaaatgagttactaaaaaatatacaaaaatattttaaaaatgttaaagttacatctaatagagataacaatatttcatttgcatttatggactatgtgttagaatataaaaatgtaagtgctcctgttgggattgttattagtgttattgaagaaaagcctgaaattaataaattgagaaaatcattaggacaatcatttaactatgtaaataaagaagaatttgaaaagtgtaaggttagagttttggttacagatataatggctataggattaaattatactgaaagaataggactttttcaaaaaacgctttattctatagttgaattaattccatgcgaaggcattcattttactattactgaacaagtaataagtagggaagagtatttaaaaaataatcctctaaatgatgattatgatgttttacttggtatattaaatgtaagattatttaacattgaaaataatgagaatgagtatgtaatggatacattaggattatcagcagtaggtttatgtgatttacaatgccattttaaaaatttagatccaggcgaaatatcgaatattttatattcttatggatattacatttttgaaaatagcaatgttcttgaagaaatagataccatagaaggaattacggaaaatagtaagtggaaatgtcgacatgaagttgctcttgcggaacccgaacgtgttgtattagatataaatcctggagaagatttttcatgtggatatagaaattaattgataatatgtatataagaattttatttttaattagaactctcttgatttgatgtaaaaacaagagagttcttttacgtacgcttaaaaaagcagatgcctaaaaatctttggctaatagccgcctgagattttgttattttacctggcccgtatgtataatgaaaaaaataattcatatttaaaaataactaataataaattatcattttatattgacatataaaacatgggatagtaaacttataaaagtaatttaaaaatttaaagaaatatgtagaaaacaacggcgttttcatttcaaaaaagatatatctagtatgggtataccttctttggagtgaagcgtcttttttattttttaacaacttagaataagcaattgtactcaaaatttaattaaatttattcaagggggaatagaaaatggaattattaaacggcgcagatatgggatttgtaattattagtgcagcgttagtaatgctaatggtgccaggattagctttattttatggaggtatggttaaaagcaaaaatgtattaagtattacagtacatagttatgcagctcttgttattatatctttacaatggatttttataggttatactttagccttcggtccagatgtaaaaggagtaataggtggtttagattggagtttcctaaaaggtataggaatggcgcctaatgcggattatgcaggcacaataccacatttagaatttgtagtatttcagttaatgttttctgcgattactgcagctgtaatttcaggttctgttgctgaacgtatgaatttcccggcgtttataatattgattattttgtggagtacatttgtttatgatcctatttctcattgggtatggggagctaatggatggttaaggaatttaggagtccttgattttgctggaggaaatccagtagagataaactcaggagtttctggactagttgcggcaattgttgttggtaaaagaaagagagcgatccctgaaccacaccatatacctatggcaatattaggtggagggcttttatggtttggatggtttggattcaatgcaggaagtgctcttgcaatgaattatgtagctgtaaatgcattctttacaactaatacttcagcggctgcaggagcagttgcatgggtactttgtgaatggttgctctataaaaaacctacagccttaggaacagtaagtggagctatagccgggttagttgcaataactcagggggcaggattcgtgagccctatatcagctgtgcttattggagcagttggcggagcattaagctttttcgcaatagctatattgaagaggaaattaggatacgatgatgccttagatgcttttggctgtcatggagtagcaggaatttggggatctatagcgacagctatctttgcatcaaaggcaattaatccagcagggagtgatggattaatatatggtaactttgcacttttaaaagctcatttaatttctacttgtgcaactgccttgtatgcagcagttgcgacatttgtaatacttaaagtaatgagtttagtaatgggcttaagagctacttcagaacaggaagcagagggattagatatttccttacatggagaagaagcttattcaggattaaatatgtagaaacataataataaataatgtataagaatttagtgaaagcaaaatccaggttactaatataacttggattttgtttttttattgtctaggaaagtatagaattttttgattttgaaagccagtgataccaatggggtataaggatattgacctgtaaaaatggtataaagaaagagcgtggcgcagccacttttgttcttctttaggaatttatattccagtaaaattgagggtataacctaaaaaggttgatttttaattttttctatcaaaaataaatataaatttgtcaatttaaatgagaatgtgataataaataagaagatttattaaaatattgctaataaatatgactaatgtcaaaaaaaatgtcatttttgagcatagtttcataaaaagaatataaaatgagatattttggcatattttgcgatataatatgaattgaagttaattatgaggtgggggaaaatatgcataaagcacaaagtcaaattaaatcagtaagtataaggttatacttactgattacaattgctatgttagcaataataccagtagttattttaggtatcatttctacaacgacatcaaggaggagtaatgaaaagagttttgatgaaaatagaactttactctcaaatataggacaggaaataataaataataagattacatattatgaagatacattgaaaacattaattgagaataataattttaatattgaagaatcaccatataataaattgaatggagatatgaaattaattaagaagactgatgaaagtattttaaatatatattattcagacaacactggaaaagtatttcaaatacttgatagtaaattgccagatgattataacgctacagaaaaatcatggtttaaagagactatagagaatccgaataaatatattattcatagtccttatcaagataaaataactggaaaaagcgcaataacaatatataaggctgtgattaaaaataatgtaccggtaggcgttatggctatagatgtagagctaagtgaactagcagatcagttatcaagtataaaatacggacaaaccggagagtttattattactgataaagatggtgtagttatttctgacaatgacaaaactaaaattgctggaacagagccaactgaatacaattgctggaatcagatatcaactggtgataaaggtaaaatcaaattcaattataataatagtacatatgaggggtattttgagacctcggaacttactggatggaagttaatactaaaaatcccatctagtgagctaaggaaatcagaaaatgattcaactatagcatcaattataattatatttgcaatagcggtaatcacattaattataactatggctattgctaggagaataagtaaaggagtaaattccttaaaagatggaatggaaagaactgcgaatggagaatttaacaaagaaattattataaataatcatattcgcgaatttataattctagaaaatagttttaataaaatgcagaaaaatattgcaaaattaattaagagtgttgataattcggcaataaatgttaataaaaatgctataaattcagttagtatgagcaaagaagtagcaatatcgatgaatcaggtaagtgagacaataaatcaaatatcaagtggaactatggagtcttctaacaatttagaaatgatatcacacagcatggacttactatctcaatctatgaataagatagaagaagcgactgaaagtgtaaatggtatggcaataaaagcaaatgatttaggtaaagatggaataaagattgtaaagaccgttataaataaatcatatgaaactaaaaaaagtactgaatcagtaaaagatgttgtaagtgaagtttcggaaagtataatgaaaataggcaccatgaataaggcaataagtgcgattacagagcaaacaaatcttttagccttaaatgcagcaatagaagcagctagagcaggagaagcaggaaagggatttgcagtagtcgctgatgaaataagaaagcttgcagaagagacatcagtttcagccaaacaaatagatgaaataataaaagaaataaaaagtaaatcagaattagcagttgacagggtattagaaacaagtggaacagtagatgatcaagagcatgcagttaaagaatcagaagtgatatttacagaaatagtaacagctatagaaagtttaacagaaaaggtgagtaaaatagctgaaggtgtgagcaccataaataatatgaaggatgatgtagttgaaaaagtagaaaacttatcagcgatattagaagaaacagcatcgggaacagaggaagtttcagcgacagcgcaagaagtgacagcgtcaacagaaagctttgttgataattttaataatttaaaagatatggctgaggaattgaaagaaaaaattgaagaatttaaactataaaaatataaaatcattatgatatatatgttgtaataataaatttacgtttaagactctagtgagccaagtgataaattaattgataaatgtagaaatttaattaaaaaatatatatttaatgttttataagatataaaggattgttgcaaaatgcaatgatccttttacaatttaaaataaggtctaattagcaaatagttagtgtcagatacaacctagttttcatataatattatattttaagaaaggtgaatatatatgaaaaataaccttaggtttgatagtaatggcaagtttaaaatagttcaatttacagatatacatgaaggaccgagcagagacaaatctatagatcttatgaataagatattagattacgaaaaacccaatatggttatattatcaggagatattattgacggcaaatgtcagacagcagaagatgtaaaaaaagctataaatcatatagcggagccaatggaaaatagaaatgtaccttggtgtatagtttttggtaatcatgatgatgaacataatatgatgacgaaagaagaaatgatgaatttatatatgagctttaaacataatctgagtcaagtggggtataaaacttttgataggataggtaattataatcttcttgtagaaagttcaaaagataaaacgcctaaatttaatatatatatgatagattcaggaaaatacgctcctaccattattggaggatatgattggataaaacttactcaaatatggtggtataaaagaacagcgataaatttgaagaaaaaatataaaagattaatacctgcgcttatgttctttcatatacctttaaagaaatttgaaaaggcatggaagactggattagtaaatggtgaaaggcttgaagatgagagctgtgccaagataaatttatgcttatttaacaaaatagttaaaattggggatgtgaaaggtatatttgtagggcatgatcattttaataattactgtgctgctttagatggtgttaggcttggatatgctggatatactggatacggaggatatggagatgacaaaattcctcgtggtgcaagagtatttttaattaatgaagaaaatccagctgattttaaaacttggacaagaagagagtttgatacagaacttaaaaagtaaattctataaaaaaataattttaggagatatattttcatgaattagtatatatggaattgaaaaatttattgatttttaaatgaatttattagcatggcgataagaaaaatatatataatatatttaaatttataaatatatactattgaataaatggtattatattgaattaaacgattaaataatatccatttttacaatattgtgacttaaatttagtgtgtataagttgaaaaatgttgtaaaagatgtaataatagaataaaaatgaaaaaaatataatatcaataggcacacttattgaaaaatagggtcgcaaagctatgagtctaaggaaaaatttaattttctatgattgtcaggttgccaaaatgtatctatgaataataaattttatattttaattttggtgtccacaattatgtagacaccatttttgtgctcttaaaacttacaataagaaagctatttttattattttttcatgtgcaaagtatttgctgctagagattcgaagtttgaattataaataatattaaaagatcagaagggagtggagaaggctaataaaatataatcatagtaattagtagcaaaactaaaataagttggacaaacagtttgacttaatgttgcttataaaatcgcgttgaaagtttgactatgaaggaggcgaaaagattattttttgcgattttaataatctgaaatgatatgagtaaaatagacgaattattaaatgaagtagaagtcatagtaaaacaagggataaataaagagggcgtaatagaaattttaaattctctaaaatgttattttccatacgaaatattagatgaaatgaaattatatggggactatttacctaaaaataatgaattagaattttcagaagaaaaaagatatcttcattttttatgggatgtactagataaatcacctatgtgcttaattgccaattttgctattccttatagacagatattagcaaaaaaattatttaagtcatgcggaaagaattttatagctgaagaaaatgtacgtttcaatgttcctgacaatatagaaataggagataacgtatttatgaacaaaggtgctttcctagattcaaaaggtggaataacaataggtaactcagtaggaattggcgaaggcgttacaatttttactcattctcatgaggagcatgaacatgaattaaggacatatgcaaaagtagtaattaaagattacgctaaaatatattctaattcaactatattgcctggagtaacaattgaaaaacaaggaatagtagcagcttcttctttagtcggtaaaaatgttgaaaaaaatgagttggtagcgggtataccagcaaaggctatgagagagagaaaaacattagatagaaatcaggaagaattaaagcatatatggttgcataacggtgaatttcaagattaaaaaatttgtacaccttaaggaggaaatgattaatcatgagaatatcatttaaatcaaagttaatggtaataatattgccgctagtaatagttggattgatatcgctgacaggatttgcatatattaattttaggagcattatagaaagcgaattagtgaattccatgtcattaagaacaacagaagcaactggtcatattaatacatggctgacgagtagaatggcagaagttcaagaaacagctcaaagcccagtgcttaaacaagttttggaaaaaaatcctggtttaaatttaaatagcacagatggatcattaaacataatagatgatttaaatttatcaagatttaattttattaaaaatacatatccagacgaatatgcagcagtgcatatactaaatagcctagagcctaatgaatggagtaacgctgatagtttgaataagctacaagcgagattttataatgtaagcaatggaaaatttgcaactgctaattgggctaaaggtgctgcaacagaagcttcagaaagatattcaaagacaaatggcgttccttatgatgcaatatttaagcctacatattctgaagcttatgataagaatgttgtaatgatggttgcatggaataaagatgcacaaggaaaagttacagccggagctgcctcaagtttggctattgaagcagtagaaaatcaagtgaaaaatctaaaatatggtcaaaaaggttacggaatattattaggaagtgacggaacttttatagttcatccaaataaagattgggccatgaaagagaaaataaatacagttaacgattcagatcttactaaacttaatgaagccattcaaggtgataaaccaggagtttttaaatttggaagtggatctgagaaaaaaattgcattctatgcaaagtcaccgatttctgggtggacagttataaatgttgtttatgaggatgaactttttgcttcgtctaatcatttgatactaattatgattgggatagttatagctattatagtaattttatcagcagctatatttacagcagcaactaagttgatcaaacctttagtacgccttaatgagttcgcggaagttatatctactggagacttaagtggttcaatagaagtaaaatccaaagatgaatttggaaatcttgctacagcgtttaatcatacgatagaagcattaagaggcataattacagatataaataatgaatcatcaaaggtaaatgaagtttcaactaatcttgcaaactcgtgtgatgatagtattaaagtcactggagaagttgctaaagcaatacaagtaatagcagaaaatacaactgagcagtcaagacaagtgactttagctagcgagaaaacaagtgaaatggaagaagtaagtagaattgttgttaataagtgtaatgatatgcttgaaactgctgaagaatcacataacataagtgcggttgcttttgaagcggtggataaagctgttgaaagtatgaagctaattgttgaaaataataaaaccaatttagaagaaagtaaaatgttacttgacagatcaaatgaaattggtaagattgttgaagttataactaatattgcaagtcagactaatttgcttgctttaaatgcagcaatagaagctgctagagcaggagaacaaggaaaaggatttgccgtcgttgcagatgaagtaagaacccttgcggaacaatctgctactgctgccagtcagatttcggctttaataagtggaatacaaaatcaaattgagaccattagtagtagtatggatgaaggttctaaggaaattactgttggtatggaaacagcgttaaaggctgaaactcattttgataatatagaaaaagctataagaaacatttttgatgtagttcgagatgtatataattctacagaatctatgattaaaacagcaaaagatacagtagtagaaatgcaagaaacatcaattatatcagaacacacggcatcagcaacagaagaggtatcagcatcagctgaagaacaggctgttactatggacgaaataggagattcagctaatcaattagcgaaattggcccatagattaaatgagttagtatcaaaatttaaaataagcaaataaggataaaaaataacagtaagaccatagaattattagtcttactgttattttttataagttaaaggtacaatattaattgaatactatacctttagaaaacaaatgtattatttcatatctgttaatatattttccattttattaaactggttactgacatcactatctggctttttagttaaaagactaacgataattacagatagaagtgataatgaaaatcctggaatcatctcatatagaaaactagataaacctaaaacaatccataaaagaactgttataccaccaacaatcattccagataaggcaccccatttagtcattcttttccagtacagacttaataaaagaactggaccaaaagacgaaccaaaaccagcccatgcttggccaacaatatctaaaatagtcttatttggaaggtatgcaagtactgtcgcaaatgctgctatgactaatacagctaatttacctattaccatttgttgtttttcggaagcttctttattaaagaaagctagataaaaatcttttgtaatagaacttgaacaaactaaaagctgagatgagatagtactcataatagcagctagtactgcagataatataattcctgtaataaatggatgaaataatatatcaccaagtctaagaaaaactgtttcaggatcacttaatggagtgttatgttcagtaaaatatacaagacctataataccacttacaacagcacctaaaagacctattgccatccatccaataccaattcttcttgctgattttaattcttttgcagattttattgccatgaaacgaacaataatgtgaggctgtccaaaatagcctaagccccaagctagaaggctaataatactagctatgctagtccctctaaatatatcaaataatttaggatcaattgcttttaccttatttacaaatgttccaggatctacccctatattcatatacgctacaactggaacagtgattaaacatataaacattaaagtcccttggaagaagtcagtaaggctaactgctaagaatccaccataatacgtataaagaacaacaacagatagagtgacaactacacccattgtataagttagcttatatgtatcaacgaataattttcctccagcaacaagtcctgatgaaacataaagaataaagaaaacaagtattacgataccagatacaagcctaagtatgttagacttatctttaaaacgattttctaaatagtctggaattgtcatagagtcatttgcaatctctgtgtagactctaaatcttggagccagtagaaggtagttaaagtaggcacctacggttaaaccaattcctatccaaatattagatataccagttaggtaaactgctccaggaagtcccataagcatccaaccgctcatatcacttgcgcctgctgataatgctgtaacaagaggtccgagtcctcttcctcctatcatataatctgaaagattagatgtttttttgtaagagtagtatcctattgtaagcaaaataagtaaatatactcctattgctataatggaccatagtttcatattaaattcccctttctatacatttaatgttgttgatattgttcttagaaatgataagtggataaaataccttttttataaaaacgatatgattatattatcatattatttaaaaatcgacaattaaatttagaagtttatactttgtgcgttgctttaagctaaaattgttaaatgtgaattgtttacaaaataaagttttaagcccaaatagtttatataaattaagacttattgtatccagcaaatagagcatatatattagaacaatctttgattaaatatcatatgatacatcataaaacagtattaggagatgctttatttaatgaaaaaaaagttaaaagtattaactgctttattgatttcgagtataactgccatatctatgtttggctgtagtagcaataataaaactaaggaaggtaaagtaactgtacgcttaaatgaagttacacgttcagttttttacgctcctatgtatgttgcaatgaaagaaggctattttgcagagaatggaatcgaaattgatttacaaacaggtcaaggcgcagataaaactatgcaagcagttttaagtaaatcagcagatattggtttttgtggaccagaacaaactatttacattaataatcaaggaagagaagactacccagtactttttggacagcttacccaaaaagatggctctttcgtggttggacgaactaaggaagacaattttaagtggcaaaatattaaagggaaaaatattataggaggaagaccgggtggtgttccagaaatggcttttgaatatgctatgaaacacaataatattaatccaaaaacagatgtcaatatggtaaataatatagattttgctgcaactgcaggtgcatttgggcgctacattaaagagcgcctttttttttattagtacaaaatagctttatttttgcttccttagtatcaggattatatttaatataatctactaaagaattaattagaagttttttcataggattatcggcacccatccataatgttttaaaattcaataacatagatgttgatgcattaatttcttttattgctaatttgaagttattattcaaattctctaattcgaattttttgaatttaagagatttaatttccccgtttaattcctcaatccttttttcaaatacatcatatagattaggatttaatgatattttatctagtaaatttctaatctggatctctttttgagatatctgtttttcataatttttaatatcagatttatctatcatttctgactctaaattctttttataattttctatagcttttattaatgaacctttatcggtagtctctttaaataaggccttcataacatcattttctagtttatcaactcgtatatttttacttgtacataattctctattagaattcattttatttacacaaatataatatcttaaaagatcaccagtctttttagatttatgcccttgcttttggatcatgcgcccaccgcatttcgagcagtaaagaacagaattaaatattccagaagaatttccactaactaatcttggagctaagtctttatttctatctaaaagcttttgaacttttaaccataatacatcctcaattattccttcatgttttgaaatagataatatccattcacttatatctctatatttatctttagaatcttttttattatagctgagtattccatttccattaggttctccgaatatggtagcacctcttgattctaagtaactgataacaaaatcagaagatttaacataaacaggatttctgagtaatagctgtaaagcctttatatcccaagaagcattacgcttcgtattaatgttattttttattaaatgtttttgtaatttgcctaagctacctaaatttaagtattgttcatagaagtattttattaattctatttcctcattaataggagagagtttcataagttttttctgttttccattactgtctaaatagtattcaggttcagaaacaaatccataaggagtagtacctccaagccaacgacctgttttagcaagctcatacatattatcccttattctttcagcaatggtttcacgttctaattgcgcaaatacactactaataaacatcatggcagttcccatagggctagttgtatcaaattgctcacgtatagatataaatcctatatttaaggattttaattcatcaattaatgttgagaagtcagaaacatttctgctgattctatcaagtctataacagataattgcatcaaacttttttaaattcgcatccttcatcatttctttaaatctaggacgatttatatttccacctgaaaatccttcatcctcatatatctcaagttctgagtaattattatcacgtgcatattttttacatagttctatttgattttctacactttcacctttaccagtaaattttgatttcctggaataaatagcagctctcatatcatacctccaaattatttatatattgattgtagttttatataacaactaagttaattgagtataactacatataattaataaaaagtagtagaaaaagtactatattgcacaagcattataggggatttccctagctttaaaattatttctaatattaatatattttaattcatctaaagttatagatagaattttatattttattatttcttcagtaacgttaaagtattcagccatgtctggtatggtagaaatgcagttatgcaaagcttgtacaaattcttcatcacttatcaaaaaattagcagcccataacttggctattctttcttttttattttttagaagttcttcagcataactatttgagtcttcaattaaatcacctaacgtcgtaaaatgatgcccaagttcttcagctaaaactgatatatatttatagctacatgtaacaatagatttatctatgcctatcgtcggtggaatcccaggaatcttaaaatatagtccttttgaccaactatctttaaagtttgtttcttcaagaataatattttcattgttaattatattaaaaattgtatttaactttttcatttgtcaatcaccaccatgtaaattatggaattattataacacgagaatgtatgttcgcgcaatgagaacaaaaaaagtgttcatggtgaacaccttactttttatctttatatttgttttttatataatctataaaattataaatttcttcctttgcttcaggcggaagatctttataatcaatatcactgtgaagagctattgtggtttcatcattatcttcaaatgaaataccattagcttttgcaatatctgacttccctaagaggtaatctatagatacatcaaagaaatcggctattttttgaagtgtaggcatttctgggatttgctttccactttcgtattttgaaacggaagtttggcctaaaaataacgtcttggctaattcagtttgagttaatcctttttttagtcgttcatcttttaatctatcagcaaaagttgccatctatatcaccccttattaaattttataactaatatgatttaaaatctataaatatgactataaagaatattttttcataaaaatcattgacattatgacttcaaagcattattataaaaatatagattatgattttagagcataaagggaggcggacaatgggaattgttaaattaaaaaatttgagaaaaaaagctaactatagccaagaatatatcggggacaagctcagtatatctcaaagtacctataataaaaaggaaaatggcataaatccatttacattggaagaaataaagttactaaggataattttaaacataaaagacagtgacataatagatatttttttaaaataaattatgcttttaaatcataataatattttaatacaagaatgggagagaatggaatagtgcaagaatacagaaatatttaccaaatagcgagagagagtacaggcttaacgcaagaaaaggcatcagagtgcatggacatatctgttgacagcttaagggcctatgaaggagggaagagaacaccaccagataaggtagtaatcaaaatgattgaaatttatgatactcaatatttagcttatcaacatttgaaaacaagtgctgaggtaggtcaaaaatatttgcctgaaattgaaatcagagaattaccagtcgctatattaaggctgcaaaaggaagtagctgatttccttaagcttagagatgcgatgatagaaattacttgtgatggaattatagatgagtatgaaaagccaacatgggatcagatagtaaaagaactagatgatgttgttgaagctattatggctttgaaatttgcaaagtaacacatgaagatcatcaatcatattatgaaatgattgatattaatgggggagtagtaatgaaaggtgatgaaataaaggtaacaatattggatttggaagataggaaaggatttagcgatctattagctgaagcacaagttgaagcagctatgagaatgtgtccaaaggaattaagactcaaagttttgaataatgcattggcaattttaactggagataagaatgcagttactaaatagataaataggcttaaatgccttgaatttaagaaaggagacataagtttatatgtgtaagataaaatgtccacattttattcagaatagccataaattgcgaattaagattgaggagaaggatattaggcaagtgtatttacttacattttgttgtgggagtcataaaatatgtaatttgtgtaaggaggattagattatgaacagatatgatgttgagatattatatcatgaaaatggattaaatgactataagcttactagcttagaagatttgaaaaattgtcatggtattgatgcagaaaaagttaaaggttatgaggatttaacagaagagaataaagtgatttttaaaaatttcataattaattattttaatgctagaggtatagattcaagaatgattactgctcctaaagcaattaattatgttgaggatatagatcatgtagcacaagatccagatgatgaagaatgtgtagtaagtgtatgcaatgtaattaatgtaattaaagctgatgggaagaaaaggcagttacataagtatgtacgtaaagaatataaagatttagttccaatagagcattatagaaaagaatatttaagatttgcatttttagaaggtaaaagtaaagtttggcttcatgtaacacatgaggggaaacaatggtactaataaaaaagaaccttacataaaggttcagtcaatctttgagatacggatcactactccgtatctccattatatagaaaaatggaggtaatgtaaagatatgaaagttataagttttttaaatgtgaaaggtggagttgctaaaacaacttcatgtgtaaatgtagcagcagagttgggaagacaagggaaaaaggtcttgattatagatcttgatcctcaaagcaatgctacaaagtacttaaatgtgtacaatcctaacactaagggaacatatgaattgcttgctggtgaagatgttccaatacaaggaactatatataaaaatctttggattgttccagccaacataaatctcattatgagtgaaggtgaaatacttgcagatactaagaaagctagagaaacaaggcttaagaaatggcttaatagtaagaaagaagattcatttgattatatattaatagattgtccgcctagtttaggaatgttgtctattaatgcattggctgctagtaaatatgtcattgttcctttgaaaatagataaatttgcactagatgggtttgaatatctaatgggtagcattcaaggagttaaagaagaatttaacgatgaattaaaattgttgggtattttggtaacaatggatagagctacaacaatcaacagagaaataaagcaagagcttaaagaagaattaggggatatgctatttaaacagagcataagggataatgttgatgtgattaagagtacttttaattctactccagtaatttattttaatgcaagagcaaacgcatctaaggactataaaggttttgtggaggaaatgcagcaatgtcttatttaaaaggtatagcagataggataaatggagtagagaataaaggattcacacaggagctagatataaataatctagttccttcacaaaataatttttatggtattcgtgaggttgaggagcttgcagaatccataagagaaaatggtcttatgcataacttggttgttagaaaaattaatgatgatatgtatgaaattatttcagatgaaagaagatatagagctttaaagaatcttggctatgataaagttccatgccaggtaaaagagataagcgatttagatgcagagataatgcttattcaagcaaatgttgagcaaagggaattactgcccactgaaaagatggaaggtatacgaaggcttaaagctatctatgagcaaaagaaggcaagtggtgagcaattacctaaaggaaagattagagacctaataggagaagatatgaagctttcaggtgtacaggtaggaagatatcagaaagtggataaggacttgataaagccacttaaagaaaagcttgataaggaggagataacactcactcaagctcatacacttagcagtttaactaaagatgaacaagagattatacatgaagaaattaaggaattgaatgctaaagagtcgaaggaagagatagagacacttgttgaaggaattaagcagcctgttaataagaaagatgagaaacttttagaagaaatgtacccaaaatctagatctaaggaagtcatatttgaagaatttgaaaacatgattaaatatgatccaataccaaaattaataatattatcagcagctaaggctgttttaaatacacagaaagtaagaatagtaaatggaacattaagcgttgaattaactggtgaagacccaattaattcatttaggattgaatttaaaacatttgataaagttcaagaaatactgatagaagagaatagacgagttgcattagaacatggatataaaataaacgaatgcacttacctttggtttaaaaatggagggatattgaatgaatgacgaacttttttgtactggaatatatgaagatggatatggagttatccctaaacaagtaatgcgagattctagtatatccactggagcaaaattagtatatgcatacatatgtagttttgctggagcaggtggaaacgccttcccatctcttgatttaatatgctccgaattatgtatatctgaaaaaaagatgtacaaatgtagaaatgaacttatagataaggggttaattactgtcaaaaaaaagagaataggaagcaaatattctaataatatttatacattggtgactaatcctagcaagcaaaaaacaattgaacctagtcaaaatggacgtatccaaaatgaaccaagtaaaaatgaacctgtccaaaatgaccatgttcaagaaagtgaggaaataagccaatcttttgaacctagtcaaaatggacatgtccaaaatgaaccctgtccaaaagtgggtactataagtaacagtattataaataaaaaagaaaaaagaaaaagagataaaacggagtttgatattttagttaatgagtacacaaagaatgaaaatttaagaagtacaatctatgaatttataaaacatagaaaaactatcaaagcatcattaacaactttagcactaaagaaaatattaaataaacttaattccatagcatcagatgatactactaaaattactattttagaaaatagcataatgaatggttggcgtggaatattcccattaaaagaactgaatcagtcaaatgtaattccaatccaatccaagaccaaagaaccagttaaaatagataaatcaaagttaggagcgttgtaatatggaaattctagataagatgatgcctaataatattgatgcagagcaagcaattcttggatgcataatgaataatacagataaattactggaagtcgagttgatgttattaccagatgatttttatattgataagcataagaaaatatatgaaatagtaatatctttattcaatcgaggaattggagcggatctagttacagtgttagaggaaataagaaagaaagatttgcttgatgcatgtggaggcgtcacatatgtatctgaattatcaaccgcatattttgaaagtattaatgtttcaagttatgcaaacatagttaaagaaaaagcaaataggcgaaaattaattagagcgagcaaagctatgttagagggcgcttatgaggaagatattaaaagcgtaatcgatagaaccgaaaatgacttatataaaatatcaagtaatcaaaatacaaatgattttgttccaatcgataaagctgtagaaaaagcattcataaatttagagaaaagattcagtaatggtggagatttaattggactatcaagtggattttcagatttagataaaattacatgcggtttgataaaaaaagattttgtaataatagcagcaaggccatcaatgggaaaaacagctctagcactaaatataggacaagcagcatccaaagatgcaagtgtagctatattttcattagaaatgtctaatgatcagttaacagatagattactatcagctaaatgtttaattgaatatttgaaaattaaaactggtcaattaaatgacaaggagttcgaggacatttctattggggctaatgagttaatggcaaggaaattagttctagatgatacaacaactattttaagcgacataaaagctaaatgcaggaagctaaaaattcaaaagggcttagatgttgtaataatagattatttgcagctaataagaacaacaatgaagacatcaagtagagagcaagaggtctcgcatatttcaagagagcttaaggcactagctaaggaattagatattactatgattgctttatctcagttatcaagagctccagaacaaagagcggatcatagaccaattttatctgacttaagagaatcaggatctatagaacaggatgcagatgtaattcattttctctatagagatgagtattacaacaaagaaacagaagataaaaacattgcggaagttattacagctaagaatcgtaatggacaaacaaccactactaaacttgcatggctagggcaatttcagagatttggttctctagatgttataaggaggtagagcgaatggagaataagaatgaaattatagataaggttgttaaagcatattttgaaaagcctgataaaactttagaagaaatttttaaggaatatacaaaaggattttcggatgataaaagaagatctttctataaaaaaataaaagaaatagtaaattgaagtacttgcaggactaggagcgttggcaggggttacgaattgttaatgttaaggttactgcaataaaaaatatacaaggggagaaatcctcttgtagtaaataaggtgtaagtatggatattaagatagataaaagaatggaatataaatttctagaagcatgggaaaaaggaatagatgatacaaatgtgataattactagcaaaaaaagtggcgaaagctacaaaattgatatatcagaaaagcagaataaattaaagttttataatccagtaatagctaattggcagccatgtacttatgtgttgccggaagagatatttgatgtgtggtatgtgaccgcagtataggggaaaggagtaacaattatgagtaataatataaaagatttactagtagcaaacggatatatatatggagggagatcatgataaaacaattaattgctaaagttaaagaaaatgctacagatgattggaaattagtagctggattagagatagcagtcattgagctacaagaaaattcaaatgaatttttggtattaagacctattcaattagatcaaatggagaaattctttaaagtaatgcatgaaacttttggtaaaaacgaattctatgaagattatgattatttcgtatgttatgcagtcagtgaagattgtgacgatattctattaacaatcactaaggaaaatatagaggaattaagacaggccactaaaaaagacgtatcaattcataataaaaatttagagatattaaagaaaaatcataattggtataaatataaaaattgattgtaataatgcgtaaagtgtagagttaaggagtaaaaggaatgagtgctaaaaacattgaggttagaaaactattaaatgaaatgaccaaagaggaattagttgactgtattatcagcaataatgcttatttttgtattagtaaagatggtggaatttcaacagctagacattatttaattacagcattattaaatagattagagaaaataaataaaattgatactggagatataacaaaagccaaaaacagaaaagaaattatagatattattgaagctgatagaaagaaccgtaagaaatgggaggatattaataaaagaattgaacaattaatgaagagtaaataatgcacaaagtgtagatattgcgtaggaattaatgattaaaatattaaggaggaattttaagatggataaaattattgctgtaagttggagtgattacgaaaagcatggttgtgtaaaatgtggttgcgaatattgttatagtcaaggaatacaaggtagagggacttcacctgttatttgtggcgaatgtggagaagattttattatattagcagatggacttaaccaatcagcatttggatttggtgaaccaactatttatcctgagttgcaagaacacccaaggaaaggtattcctaaacataaatatgttaaacctgacattaagcctgaaaatgatggagaatactggtctccaagaggtgtagggtatgacttatctgggttcgttaaatgtaaagaggctggggaaagaatagttagaatggtagaaaaaattataggcagaactcctaatacatggcttgattacagagaacatgaaccaaattggatacaagtaaaagttcaaaaagaggatggttttgacttggaaaaacttaaaaaattatgcaaggaagatgggattattacagaagatagattgaaaaaagcaatgattgtttaatgcgtaatactaagaggagggatagagctatgttaagtaaagaagcatttgaaaaaatagaattggagcatggctgcggatattggaatttatgttgggaacatgcatgtccatgtgctataaccacagaaaataagggattaagagaagatatttacaatggatttatagaagaaaataagaaacttgcagatgaatatgattctatggaagatgttgagcttactaagtatgcaaaatgtagcgaatgtggtgactgggaagaagaaaactatatgacagatgggatgtgttcagtttgttatcatgagctacaagatgccttggaagaagagtattattttgaaggtgaggaagagcaatgagtaaaatacatgaattgaaaatattaccacaatactttaatgctgtgagagaaggcaaaaagacttttgaattaagaaaagatgatagaggttttcaagttggagacgttctaatgcttaaagaatttaatctacaagagaaatatgaaaccattgagggtgctgaaacatatttcactggaagaaagatattaagacaaataaattacatcttaaaagatgaatcagaaagcatgggattaaataaagaatacgttatattgggaattaagcttatagatgaagatgtagaactagaatggaaatccgatatgaacgaatggggagagatatactgtcctatgatgggaaaggaagttaagacatattggcctaatggaacgccatgctatgatactgtaactaatccgttattagatgaagatggaaatgtttattactataaatatgaccacgatgaaggtgcttgggatgaagatgcatcctttactctttgtgatgcagaagagtatataaatcttgaagaaattttattttattagtacgtcatactactacagtatgtagaaaggagtaattaatttatggataaaatgagtgaaaagctaataaaggaaatagaaaaagctttaaatataaaattttataaatggcaacgtaagtatcttttaaatgagccaatgttgatagatatgaggatgactgggagatgtactggaaagacttttgtgtatattataaagaaattatttgaatatccagaaccacttgtactaacgcgtagaactgaagtgctaaaagttgctgattggtggtgttgcgataatagagaagatagtgcattgagaaatccttatttggattggtacaagcaggaattaaagagtatatatgataatctaaacaaggcaggaattattactagaaaggttgtttttcattagtaatactaaaataaaggtgttcatcacgaacacctacctcaattagagaatagaccttggaacgttagttctctaatcaacctatctaaattataccatattttataaaggataggtgatataaatgggagaaataaaaaatcaatttgaattatatagagaaagaatttgtaagatagataataagaatattgaaatagaaaatttaattataaatggaattaaagaagatgatgaaagaatcaaaaaactaaaattagatataaaaaaattagaattagaaaataagaagatagataacatattgaaattacttcctgaaaaagattataaagttataagtcttatttatatacaagggaaagaaaaaaagaaagtagcacgagaattagatagaacaaaaaggcaaatagattacagtataaacaaagcgttaataaggatttcaaaaggattaatagagtaaaagtgtcatatttttggcacttttttgttgcatttttgtcgtgtttttgttctttttttgttgcaaaaatttctcgaaaatttctcacatttgtaattgaactaatggtaagatatgtacataaataagtaataaacataaaaaacaattttatatttctcatttagctttttaagtaaaaaatgtcacgtttttggtatggaataattatatctatttttaggaggttacattatgttagataaagtcagagtaaaagaattatatctaaaaggttatggagcatgtcaaatatctaatattctaaaatgtaaacctgaaactgttagaaagtgcatagaacgtaatttaaaagatttcaggaattcacattcagctaataaaattagaaataaagaaatagatagaataacaagatatgaatccaaaaaatatatgagtgatgcaacatttattaaaaagaatagatctatttataaaactactgctgatggagacttagtagttgatacaaacatagcgccaataattacatatgatactccaaggagattagcaaatgaaaatagtgaaaaagaaataaatcggaagataattaaaagtgggtatagaaaaaatgagttgttatattagcaataatatagcagctcatttttaattatgtttaggagggtgtttatgagggtaaaagatgttttaaaagaaagtgatactaaaagttacaacaaacttatgaaaatgaaagataagaataaaaatgagaaattaagtgaaagtgatataaaagatttaatgtctcattcaagttataaaagacacaaaggagcgataaagcaggtgaaataatggaagaaagaaaacataagtgggaaaaaggtacagcatcgccaataccacaaaataaatatgaaagattcaaagagcaattgattgaacatagtaaaaaatatgctgataggaatttaaacttatttattttggctagagcgactggatatagaatgcaagatttagttgaacttacaattggacaaataaaagatgcgctagatgacggatattttttaatacaggaatctaaacaatataaacagtggttagcgaacttacataggtatcctaacaaaaagaaacctgataaaagaaaagtatatataaaaagtaatttagaaaattatttaagggaatatgttaaaggtaaaaaaagagctgaatatgcatttccatcaaataaatccaaaaatggtttagaaccaatagaacaaaaatcatttagtgcaattcttactgaagttggcaagagtatgggattaaaaaatataagtggtcatagtcctagaaagacttatgcgactagaatatatgaaaagtcaggtaaggacttagaaaaagttagaattgcattaaatcatcaatcagttgaagaaacaaaaagatatctaggcataaaagaaaagatgaaagaggatgcagcagaaattgctgacgaagatatataatgcgtaaaaaataaactggtacttattttatatagttttaaaaaattattactaatatatgtgccttaaaaaagatatcagtaatcctccatgttattacctattataaaagaaatataaaaacagcttcaagactagtaaaatcaataggtagaatagttttattaacaaattaaaatttattggatttctaaggttaattataaagatgggaaatacatcaaaaaatgagcacaccatctcatagtaagtgctcacttttggaggtggaaaaatgaagtcaaatgaagagattataagtagtagcttaagccttatagaatcatgggtttcggatggtttgacagacaaagaaattgccgaaaaattagggatgagttactcgacttttaggcgctataagacagaaaatggcgacctaaaaagagcaattgctcaaggtaaagataagaaaaatgaaagtgttgttcaagcactatataaaaactgtattggttataaatattatgaggaagttcctacgaaggttaagacagaagttacagcaccagatggaactaaaacagtatcagaagatgtaaagataagtagtgttaagaaatacaaagggcctgacttagcagcacaaaagtactggttaaacaatagagataaagctaagtggcaggaagatcctaacaaggttgctaatgataagaaacttactaaaattaaagagaaagaagtcaattcgaaggtgattgatgtatgaagatgacatgtaagtattgtggaatagtaagtaaaccacatcattgtccacataacaaagttaaatggaatagggataatcagagaggtgataagaaagtatatagagatattagatggattaaattaagaactgaagtattagatgagtacaatcatgtatgcttatggagtttatatattgatggtcaaatacttacagcaaatagagttcatcatatagttgaagtacttgatgatgaaacgttggcttatgattatgataacttaatacctttagaatattacaatcataatttaattcatgaattatataagaaggacaaggcgagggtgcaagagttattgaaattaatgatagaaacatactcaaaaggtgataaaacactaggaaaatttgaaaactatctgaaaatatagtccccccctactttttgagttttgggaagcaaaagctccatgaccacatgcccacctttttacacacgaaattcccgcaggagagttttaaacttgggagaaaggagaaaaaaattttaatgagtgaagcaaaaccaattgaactatgtgttggccataggacaaaagaagaaattgaaaatagaaaagaagttcaagaaaaattaaagggtaaaaatgataatattgaaccttcacaaaaattaaataaaaatcaaaataaaatatttgaatatgttaggagtctgctaaaagaaagtgaaatattaagtaacgcagattcttttttattaactcaattttctattgcagctgataaacttcaatatttagatgaaaaagcaaatgaaaagccagcacttatttttaataaagattttaagagtagtaagaagctttattttgatattttctctaaatgttgtgataatttagcattaacaccacagagcagagctaaaatagcaaatattaatttattatcaaataaagaaaaagaagatcctttgctaaaagcattaaaaggtgagtaatgaatattaaagaaagcaaggcgtataagtatgccaagtggtgtattaatttaaataataggaaagtaggaaagtatgtaaaatcacagtgtgatgaatggttgtatatagtacatggatatgattcagaatcttattttgacgaagatttatataatagagtatataatttgcttggattaatgattcatcctgatttacatataccacttaatatatgtttagacgattatgctgaattatttatatatgcatcgttatgtacaagatatgaagatggaagtaaattatatattactagtttattagaaatagcaagaaaaaacagaaagactttttatgctgcaataatatttatattagaaatgttgttagaaagtagattcgatagatattttagtgtagcccctgatttaaaattatcttcagaagtaaaattggctatcaaaaaaataatattaagtagtccattactttctaagcattttaaagttactagagattatacaaaatgcaaactaaatgaagctgaatatgtagcattagcatattctaatgataatatggatggtaagcttgcaaggttatggcttgctgatgaagctgggaatttagactcatatccagttgaagcaatgagaagttctcagataagtttatttaataagcaaggaattattatttcaactcaatatcctaatgataataatgttttcttagatgaaattgattatgctaaaaagatattagatgggcttatagaaaataaacgttatttttctttattatatgagcctaatgatgaattaattaaagattgggacactaatgatttagtaatatatcaaagtaatccagtttctgtagaaaataaaatgatgtttgatgctctaaaagaaagtagaacaatggctattctttatgagaacaaaaaagaaaattatctatgcaaacacaataatatccagtataaaggactaggagcagaagggttcattgacataaataaagttaaggaatgcaaaatagctcccaataaagaattctggaaaggtaaaaaagtatatttaggtacagatttatctgcaacagatgataacacatcagttgcaatggtaactgaatatgaaggaataatatatgctaaggtgtggggatttgtaccagttgatagagtggaattgaaaacaaataaagaaaaagttgactataataagatgattaatgctggttattgttttaaatgtggtgatgatgtaattgattatgaatttattgaagcatttacaatgaatattgagaaggaatatgaagtcagtgttatgcaaaatggatatgatagatggaatgcattatcaagtgctcaaaaattagaggcagctggaattgaaatgattgaaataaagcagcatagttcggtcttacatatgcctacaaaactattatatgaatcaatcttaagcaaaaagtttaagtatgaggaaaatagattgcttgagattaatttccaaaatgcaagatgcacttatgatactaatgaaaataggtatgtgaataaaaagaggtcaagtggtaaagtcgatatggttgttagtttaataaatgcaatttatttattacagcaagagcaactagaaggtggagctggaactattcaagtaatttaagaaggaggtgtgaaaatgttctttggattatttaaaaagcaagaaaaacgtgctgaggaaaataatattattggtgatgaattaagagatgcattacttaaagctggtattatttatgatgaagtaaacagagagatggcaaataatattgcaactttagaaggatgcattgaattgataagcaatactgtcgcaatgataccaataaaactttatgaagatattgatggaaaggttcaagaagttaaaaatgatattagagtgaagttgttgaatgatgaaacaggtgacacattaacggcatttgatatgaaaaagtcaatgattcaggattatttaatggtaggaaatgcttatgtatatataaataaattaggattaaatattcaaagtttgcattatgttgatgaaatacaagtaaatgtagtaaaaaacagtgatcctatatttaaagattatgatatttatgtatatggtaataagtataaaccatttgaatttttaaaattacttagaaattcaacagatggagctactggaactggaattattgagagcaatcctttattactttcagttatgtataattcattaagatatgaaaatatttcagcaaaaacaggtggaaataagaaaggatttataaaatcagaatcaagtaagctagatcaagaggctatagataatttaaaaaatagttggcagaagatgtattcggggaattctgaaaattgtattgttcttaataaaggccttgattttaaagaaagttcagctactgcaacagaattacagatgaacgagaataaagaaactaatgggaatgaaatatgtaaaatatttaatgttccaccaagcatgattgctggagatggtaaagcaaatgaaagtgattatgagaaatttataaaaatggctataatgcctattttaaataatttcatatcaaatttaaacagagacttacttcttgaaagagagaaggagtctttttattttgcatttgatatgaaagaagtattaaaagcagatatagaaaagaggtacaacgcctatgaaataggattaaaaaatggatttttaggggttaatgatgtcagatatgaagaagataaagaaccaattgaagcatttaatgatgtaattaaattaggattgcaagacgttctttataacactaagaaaggcacaatttatactcctaatactgataaaacaagcgatatgaatttgaaaggaggtgagaataatgagaatagagattagaagtgatagtgttctgcttgatggttatgtaaatgcggttgacagatatagcagaccaataaggagtgctgatggttcattcgttgaaaaaatacttcctaaagtatttcaaagagcattagatagggctgataatgttgatttgcttttagatcataataaaaacagaaagcttggttctattaaagatggtaatttgcagttatttgaagataatattggattaagggcaatatgtaaagtaactgatgcagaggtaattaaaaaagctaagaataaagaattaagagggtggtcttttggattttattctaataaagacacctggcatgaaccagaaggtgaaattaaaaaaagagctgtagaagatttggatattacagaagtttctattattgatgataaaatgattcctatttatataggaacatcaatagaaaaaagaggaactacagacataataactgaaacaagacaagaagattttagagcagttattgaggatatgacaaaagatggtgaaatagatcaagaaaaaaagaagaaactatgtgatcagcttagaaaaggcataaaaataaaataattggaggcgatttaatgttaaaaaagaaaataagagtgttagaacttagagcagaaaatgaaaatttaaagaaacttgaagaagaaagggctcaggttgaaacagatattaataaaatggttgatgattttgaagcagatgaaaaaagagctgcatttacagatgatgaaatgaaaaagtacaatgaattggtttctaaaaggcagaatatcgaaggaactataaaggcaattgaagatagaagggcagaagaaaataaaaataaagttccaaaggataaaaaggaaaaagaaaagaaaaatcaagaagaggctgaagagagagcttttgcaaattatatcagaggtacggtagaggaaagagcagatgttaatcttactactggtgacaatggcgctgttattccatcaacaattgcaaataagataattaaaaaggtacatgatatatgtcctatataccagcttgcaacaaaatataacgttggtggaactttaaatattccgtattatgatgaaaattcacagactataacaatggcatatgcaactgaattttctgaactagaaagtactagtggtaaattcaaatcaattgaattaaaaggatttttagctggatgtttatctaagatttcaaaatctttaataaataattctcagtttgatatagtttcatttgtagttcaagctatgtctgaatctatttcaagatggattgaaaatgagttactaaatggaactacagataaagtggctgggttaagcacagtaactggcggtattattgcagcaagtgaaacagaaattactgctgatgaattaattgatgttcaggaagaagttccagatgattatcaagctaatgcaatttggataatgtcaaaggctacaagaaagacgatcagaaaattaaaagatggtgatggaaactaccttttaaataaagatgcaacttcaaaatggggatatacattatttgggaaagatgtgtatacttcagagaatatgtcaggtatggtagcaggcaaaactgctatctattatggagatatgtctggattagctgttaaattatctgaaaatgtaagtattgaagttttaagagaaaaatttgctacacaacatgctattggagtagttggatggattgaaatagatagcaaagttgagaatgcacaaaaaatcaccaaattaactatgaaagcatcagcttagttaaaggttgaaaaccacctttaatttaaataggaggtcaaccacatgaaagtaagtgagataagtttagatgacataaaaaactatataagaattgatacaaacgatgatgatatttttttagatgcagttttatcaggttcaaaaagttttgttaaatcttatactggacttgatgatataaaaatagatgaaaaggaagatttgtcattaccagtttttgtattatgcgcagaaatgtatgataataggcaatttacagtagataaaggaactattaatcccataattcaatctatattagatatgcattctataaatttattataaggaggcatatagtatggataatttaagtaaaagactaaactgtttaattgatgtatatggaaaggttaaatttactaatgagttagatgagatttcttataaatatgatattgtaaaatctatatggagcgaaatattacctactggtgggaatgtgaaagcttcagaaggagatactgtttatgcagaagtaagtcataagataacaataagatctaatataataccgaatttaagtaatgatatgtactttgtatacaatagtcaaaggtttgacattaagtttactcagcctaactataaatataaagacagaatagaaataatgtgtagtttggtggtggagtaatgagtgcgaatacaaacgatcttgacaattatgccaaagaattattgaaaattgctaatgatgacttgccgaaagaaagcaaaaaatttataaaaaaagaaggaaaatcattattacaagaaactcaaaaagaagctattttttcaggaatacatcataaaagccataaatattatgattctataaaacaaggtaaaatttataaatacagacaaaatggagctataagtaataggatatattcaactgatcctaaagcacatttattagaaaaaggtcatagaatggtaactcatgatggaaaagaggtaggattcgtaaagggatatgatgtatttgaaaatgcagcaaagaattttgagagtgaatttaatgcagattgtcaaaaattcatagaagatgtagttataaaggagcttggtaaatgatagcaatatcagaaataaaaaaagctattaaaaataaaattgaaaatgcactttttagcagtgaatttgctacagtttcaatagtggcaagtgatttatcagagccaatagaaagaccgagcattaagattttattagataatacaaaatcagcaagacttaataagttaaaagaaagaactcttactgtaagagtttatttttttgcaacaaatttaagagaatatgcaattgaaaatatgaaaatagaagaacttatagaaaatgagtttttaacacctataaaggttaatgataccttttatattgaagttgatgaagttgaaagtgtagtaagtgatactgtacttatttgtagttttgatttagaaatgctagaagatattcctgaaaaaataattgacgaaggagttaattatgaaccaatggaaaatttaaatattaatttagaaagcgaggaatgatgaatgagcattacaatgcctaagcttgatattatattcaagcagttagcgacaagtttgccagaaagaagtgaacgaggtattgcagctcttataatgagagatgatacaagtgcagtatttaattataagatgtataaggatattactgaagttgaagctgataagagcttatatacgccaactaattatcagtatattaaagatgcatttgagtttggaacatatgaagtagctgttgttaaaattggtactgattcagaagcaaatgtaatttcaacagcatttactattttacaaaagcaactgccgtcagcatggattactatttgtgatggtaaggctgatgaatattcaatacttacaagttggattaagagccaagaaaataataaaaaaacttataaggctgctgtatataaagttaataccacagattgtaagcatgtagttaatttttttaatgagaaagtaacgtttgctgatgagcgtggagaagttcctggagaagaatatttaccgtctttagttggaatatttgcatcatgtaatgtaacaaaaggatgtacatactttaagtgtacaaacttaactagtgtagcaggtgtagatgatattgatgcagagcttgaagcaggacattttgtattatttaatgatacaaattatgtgagaattgctcaaggagttaattcaatgactactactgatggcgaaaataatacagaggatatgagatatattgaaactgtagaagctatggatatgattatggatgatatatcttctgtatttaaaaatcagtatttaggaaattataaaaataaactcaataatcagatgttacttattagtgctattaatggttattttgatggacttgtagagactgatgttcttgatgaagaacatgctaacatagcaagtgttgatgtaaatgctcagagaaaagcatggacttcaagtggaaaagttgaagctgcatcatgggatgatgcaaaagttaggagaaatacatttaaaagagatgtatttttagctggagatataaagattttaggttctatgacgaacttaaaattcaatatatctcttttttaatggaggtggttagatgtccgtaaatgtaaatagattattaaaaggatctagcggtaatgtttggttagacacagaattaatgtcaaatctaactcagatctcagcaaaagtaaaaggtgaattttcagatcataatttttgtggagatccagcaacatattcatcttttgatgggtggagtggtgaaggaactcttacctttaaaaagatggatagtaaactatggggtgaggttgcagaagcatatttaactggagtgatgccagatataaaaataacaacatgtttaacagacatgagtacaggaaaatcagaaagagtaagtattgaaggaatagtatttactgaatttacattagcaggatttaaagctaaagaagctatagaagaagaatttccgtttaaatttagcaaatatagaatacttgaaaagattgcttagtaaaaggtgctcttaattttgagcatctttaaattttggaggtagttatgaataaagaaaatataaaaagattgacattagatgattttagaaaaaaagcgattgaaaaaattaaaaatagatgtaatgtagtctacttaccagtagaagggtatggagaagttgagtttaatagaccaagtgatgatgatttattggaatatttagatgaagcagctaaaggtgcaagaatggataagcaaggtaatgtaacaggtgctaatattagtccaattgctcaagctgctaaagttctagtttataaatcatgtaagtacttgcatgattctgaattacatcaagaattggagctagcagagccttatgatattgtatttaaattatttggaattgatgtatcaatgtcacttgcagaaaaaataagtgatacatttggaagtaatgaggtgactaaagacataaaaaactagttaggggaattgacggaagaggtggacatttagaatatgtatcctattatttagatcgaggtcattccctggactatttattaaatttaaaaccaactgagaaaagtttttttattgaaagtatgaattttgaaattgaaaaaagaattaaatttgaagaaatgaaattgaaagctcttgcaggagaaagaggtgaagaaaatggggagtaaaacattaaatactattctttctttacaagataatattagttccaagcttgtaaaagtttctggcggatttaaggggttaagcaaagaagctcaaagagcaacattatcagctcaaaaatcattaaataatataggtaaaggaattgagaatacagtttcaaaagtagcaaagctaggaagtggtgttactacaacattaggaggattagcattaggagctggtctcagtcaagctatggacttagaaggttatagggttcaattagaaactgctacaaagtctactcaaaaagctgctgatataatgaaatattctattgatctagcaaataaaacaccttttgaaggtggtgaaatggttgaagcttcatcaaaacttgaaagtatggggttatcagcaaaaagttatttggggaacatagttgatatggcggctgcaacaaataaaccaattgaccaagcaacagaagcatttattgatgctcaaactggagagttagaacggcttaaggaatttggaataaagaaaactgacatacaagctaaggctaatcagatgtttgcaggacaggagacaattaataaccaaggacaaataactaatcaagagaactttaataaagcattacttgcaataatggacgaaagatatactggtggagctgaaaagctgagtaagacaactaaaggtatgtggtcaactgttactggtataacaaaaagtgcattatctaaaatagtagggatacaagaagacggaactgtaaaaagtggaagtcttattgataaagtaagagaaaaagtacaatttcttgcagataaacttactgaatggcaaagtgatgggactctagataatattgcaaataaatttagtgaagtttttggaaatgtatataaagttgtaagtaatttgattaattttattgttgagcataaagatataataattacaattgcaagcatggcagtaactttcacattagtaagcaaagctataagtggagtatcatttgcagtaaaagcatttcaacttgtatgggcaatattaaatggaactattatgttatctcctataggatggataataataggaataacagctcttgtaggtatatttgttttagcttatcaaaaatcagagacttttagaaatattatcaataatctttgggtaaaaataaaagagtttggatcaggagtccttgcatgggcaagtacaacaatattaccaataatacagcaaatatggagtgcattaaatgatttatggaataatgtattaagtccattcttatcatggtgtattggagtacttgcacctgtatttagtggagtttgggatactatatgtcaatatgtaagtggcgcatttaatgcaattggtgaaattatacaaggtgcatttcaaatattgcaaggattagtggattttgtaacaggagttttaagtggaaattgggagaaggcatggaatggtatcaaagaaattttcaatggaataattgagtccataaaaggaatatgggacggattaataaattggctttcaactccaataaatgctgcgattaatataaccaagcatgtttttggtggtggagaggatgcaagtgaaacagatacagcagataataatgctgttggtactaattattttaaaggtggcactacatgggtaggagaacatggtccagaattaatgacactacctagaggaacaaagattagtactaattctcaaagtaataaaattgcttcaggtaatataccaccgatacaagttacaatacaaggaaatgttattggtaatcaatcatttatagataaagttggaagtgctatttatgacaaaattagtttagcattagctaatagttaggaggggttaaagtggcagaatataatatatatataagtaataaagataaatctaaagttttaaaacttcctatagtaccacaggaatttcctacacttaataaatctatagaaaacgaggaatttaagacttatagtaatggatcttacaataatataaaacctatagggttagatactgtaagtttagagtgttggttgcctataaagaaatataaatttgctaaaagtgatgtgttagcaaatgatgttataactgtaataaacactgctttaaataataaagaatatatacaattaactataattgcaaatggtaaaagttatgtaaatgataaattttcaatagaaagttggagttatggcgtaaagaaaaatggagattattcttatagtttaggattaaagcaatatagagaatatactgctaataattatagatcaggatggaatcaaaatgctacaggttggtggtattgcacaagcgttgaaaattatacttggtattctaatgggtggcaaaaaattgatagtgaatggtactattttaatgaaagtggttatgctttatctgatcaatgggttctatggaagaacaaatggtactatttagataatagttgcaaaatggtttatggtaaatggctacaaataaacggtaagtggtattacttctattctgatggaagtatggctagcaatactacaatagatggatactatatagactctagtggagcatggagggaataatatgtatagattagttacagatggtattgatatattatataactctaatagcttatcatggggagatactgatagtagtttaggtactcaactttcatttaacagtataaaaaacttatatatgcagcaagttgtatctttatatttgtttgataaagaaatatttagaggcgttgttatagataagactgaaaaagaaggcagtatttcttataactatgttattcaagattattcttattatatgaatgataaagtaataaaacaatttaataacttacaagctgatattgcaataaattctttattaggtgaagcatatattactggagatattactactataccaacattaattaatgctatctataaaaaatctatcaatgagataatagacgatatgcttaaaaaagctacagatgatcaaggaatagaatatgtaaaagaacttgaagcaaatattctttatattagaaggttagaggatttaaagattaatcctaacataatatttgatgatagcgcagaaataaaaagcagtacagagaatatgaaaaatagcataaccgtagttgataatagtgaagataatattaatatttatgctaatgcagaagatagttcaaaattcaactggtatggtaagctaagcgagttaatagatattaatgtagaagatgttgctaaagcaactaatattgctaataataagctaaatgaacttaataaaattgtaaagagtgcaagtgtgccactactagtaataaaggaagatataaataatattattaagagtaacaggcttatatatttaaataaaggaaattttgtgggatactataaaataaaaagtgctaatcacacgctacaagacggcttgcacaaagttactgtagaattagaatggaaggtgaatccataatgagttgggaatacaaattagctaaagaatttaagaaaagagataacaaagatatagatgaagcaataattggaactgtaataagtacagatcctataagcattagtttatttaatggaagtgttattttaaataatagcaactattatttatgttctaatttaagtattttaagcggtacttgtacagttgatgggaaaacaggaacttgtacaatagatagaagtttaaaaactggtgacaaagtactttgtattccttcaaatttaggtcaaacatattttattgtcgataaggtggtgatttaatgtttccagcgcaagacaatacaatacaaaataataatataaataatactgagactactataacaggtaagtcttttttatttgatttcgattcttctgaatttgaattgcaagatggtaaaatatctacaatagaaaaactagaagcattaaaatgctggataaataaaattttaataacagataaaagaaaatatgaaatatataaaaatatagattatggtattgaaaatttaaaagacttaattacaagtgattatccttttgaatataaaaaatctgaaatcgaaagaactgtgaaagaggtacttttaaaaaataataatattaaatctgtagaaaactttgaatttgaacgtaatgggaaattactaaaagtaagttttaatgtaatttcaaatcttggattaatagaaagtgaggtgagtatatagtggctgatgatagaaatataattttagaacgaatgttgtctaatattgatgatgaactagataaaagtattggaagttttatatatgattcacttgctccaagtgctattgaatttgaaagtttgttaaaacaaacagaacaaatattgaataaaggatttgcagatactactactggaaaagatttagaaagaatagttagtgaagttggaataagcagaaaacagtctactaaagcaactggttatgtaactatatcgggaataaatggatccaaaataacaaaaggggaaatggtagctacagatagtctaaactatttatttttagaggataaagtaataataaataagacaatagatgtgcttgtagaatgtgaaattgatggatcacaaggaaatattccaactggtgcaattaaatatttcccaaaaaccttacaaggactgcaaacagtaactaataaggctgaatttaaaaatgggtatgatacagaagacgatgaaagcttaagagaaagatattatataaaagtaaggaccccagcaactagtggaaatatatatcattatgaattgtggactaaagaagttactggagttggtgattgcagaataatcccattatggaatggcaatggaactgtaaaagtagttgttataaatgctaataaaataggtgcagatagtagtttgataaattctgtaatagagaatatagaaaataatagacctataggtgcaactgtaactgttataagtgcagaagaagttcctataaatattaatttcaatctaaatatagaaagtagttatgaattagacagtataaaagaagaaataaaaacaacaataataagttatttaaaagaaatagcatttaataaagaatatgtaagtatcgcaaaagtaggtgcttttatattagatacagatggagttatagactacaattcgttaaaaataaataatggaacagataatatttctatagggagtgagcaggtagcggtattaggtgaggtgatagtaaatggataaagaaactctattatcgtatatgcctgattattataaaaattcagaagtaattaaaaacatattatttgctaactctatagaacttacaaaagcacaagaaaagataattaatactcttaatcaattttttttattagatgcagatactagccttgatagatgggaaaatgaatttggaattacaactaataaaagcctaactatagatgaaagaagaaaaagaatattatcaaagcttagaggattaggaacaagtactatagagcagataaaaagcatttgcttaagttacgtggaagatgcaaatataatagaaaataattctgattatagtttcactattgaattaataagcagttatggatttccaatttttataatgaatttacttgaaacattagaaaatataaagccagcacatcttagaattaactataaaatggcttcaataacaaatgatgatttgattttcagatcaacaatgctacttggagaagaagtacaagtatttccttatcaaataaccaatatcggttctaagggtaaattaactattgcgttagggaatacacaaaatgcagaaataataagcgttaatccactataaggaggaatataaatggcagaacaattttatacaatactaacaaatgtaggtaaagctaagatagctaactcattaccaactggacaaaaattgaacttagtgaaaatgaaaataggggatagcaatggaaattattataatccaagtgaaaaccaaacagatcttgtacacaaagtatatgaatgcaatataacaagtgttgaagttgatgaaattaatccgcaatggataactattacaagtgcaataccatcagatattgggggattttctattagagaggtaggtgtatttgatgatagtaatagtttaattgctattgggaaatatcctgaaacttacaaaccagttgcaacagatggttccacaaaagaactttatatcaaaatgaccttagaagttactaatgcatcaagtgttgaattaaaaatagatcctacagttatattagcaactaaaaaagatatcaatattttaacaaattccattgctcagattactacgcaattgtcagataaagcgaatcaaagtgatttagatgctactaatacaacggtagctagtcatacaaatgaattagcattgcatgaaatagagatagctgcaaaagcagaaaaatcatatgtagaaactcaaatttctaacataggcaacgcttcaccaaaaggaacttatgcaactttatcagcattacaaacagcttttcctacgggaactacaggtatatatatagttatagcagatggaggttggtattattggaatagttctacatcagcatggacagtaggaggaacttatcaaagcacaggcatagcggataattcggtagttgttcctatgttagaaaaaaatatttctgataattttaatattacttataataaatctaaattactaagttccgatgatggtagtataaattataacgcttttaatttatatgattactgtggatatggttatagactaaatacaagtgatttaacatctatacgaggttttgaatttaagacttatgtaaaagtaaaaacttcaaatgcaaacaatttatatgtactggaaatgactattcgagatggtagcaattttgacaatataataaaaactataacaaagaccgtaagtatcgtagctgattataatacttactataaactatttcatgaatcgtttgaaacttatttagatgttagcaattatgataatgtatatattactattcatttcattaataatgatataggtgttggggttgcttcaaacaatacagctcatccagtttcaaacttattaagttcaacaactacttatcctaataaatattataatggtactgcttgggcaaatccttcaagtggacaatacaactactataattgtgatgttagactattaacagatattaatattttattacctcaatcactcacaagaggatttgtatatgatagtggatcaataagtatcaatacaacagacaaaagaattacgaatacatctgtaagcatattactagaaagcggggaatatataacaatcccctcatcaattgtaacttatacatcaagttttttgagtggagtggattatagtggtaaacatagatatactaggtgtttatttgtaagtaaagataatcttacattctatgtcgcctattgtcctacttcatctagggatatttttatttgttcatttgatgatactaaaatctataattgtatatgcaatgataggataacaataaacagtattaaaagaggaaacaacttaattttagatgaagaaattaaaagtttatcttatcacaaattaacggatatccctagttatgatactcctgtattattatatactttgcaagatgcatttatagcttggatgaatggagagaaatttccaatcgtattcgcaggaaattctacaacagatggttataaaacaacaagttacgttgcaaatgttataggtacagaccatacttcaccttatctctatactcaactattagaaaactatctaaaggaagaaattagttctaacacaagtttaagaatatataatgctggatttagtggaaaaactttagcatggttcattgataattttgattcaattattaccaataatacaaattatgccgatactaaaatgttggcaataagttttggaataaatgatagagttgatacaaaggctgaatatgatacctttaaatctaatttagaaattctaattaataaatgttacgcaaagaatatccaaccttttctgctaacaagtcaacatcaaagtgagcattcaacttcttatactagacaatcatggtggatgggtaattttgcaaataaggctaaatatgaaattgctaaaaagtataatttagagttaatagacgttgctaaattcacagaaaactttgtaaaatatagtcaatacggtggcaatacaatatcatcagataaagtacattttaaagatatagggcataaatatgaagctggtatgttcttcgcacatatgataccaagaactatatggattgaagaagcagatagtattggatttggagatgaaaaaataaaaactgatctggttgcagatgatactagcgaaacacagatagtaggacttacaacaagagcacaaggatttgcttatagagcaaaagcaactagaacaactactgatgatgtagtaatgatggatgcttggatatttatagattctaaatttcaattaacattaaccacttatgttgaaacggttggaacgcaatatataattatagatggagtatcaacagctataacaagtcaatcgcaagcaattggaacgttagatttaggattacatcacataaaggttatgtcaggatcatctactgatttagactttataggtatcaaattagaatagtttagcactgaaaatttcataaattcacctgatataattttattttgcacttaatcatgttaaaataaaattataagggggagacaatattatgaagtatgatattttggaaaaatgcaaaataggtgaagaagtatatgtgtataaaaaaattcattttaagaagaaaaagatacacggaaaaataatcgacaaaaaatataagaaatgtataagagtttttgaagatataaccaacattactgttattataaaattagatactggtaagatagtaaaagtaaaagataattattcaagcactttacttgatatatatagttttgaagaatgtaacatcgacgaatgtaaataaataagaatttcatataaggaatataattatagtgcggtaatttttgtgctataattatattcgcaataaagggggtaaacttatatgataaactttaaaaatagtacaatatctaagaaaaaaatagcggattatatatacatatttgctttctctatttttacaattataatagttttaaaaacaacaatgtttagagtatacattccaaataatttgtataatattatacgtatttcagcattatgtatgatattaggaaaaattattttgtttgacaaatatagcgttaagcaaataataaagtatattattatagtaagttgtgttgtattagttaatattatgagtggatattcagatttatttgatcttgtaataattttgtttggtgcaagaaatgtacagctaaaaaatatagtgaaaacatattttttaataacaactataatagtaacactttctatattagcatctaaagcaggaataatacaaaatctacaatattttagaccagacggaaaaatcagagaatcacttggtttgacatatccaacagatttttctgcacatatattctacttaattttatcttattgttatgttaagaaaaaacaaatatcatatattgatataattgtatttatatctctagcaatctttacaaatgtatataacgatgctagactggattcgatttctatattgttaacagcagtagtatttttctttatgaaaattagaactaagtgtaactttggcaaaataataaatattatgttaaaatactctgtttcaatttgtgcgattgtatcaataggcataacaattgcttataatcaaaatcaatacaatgatgcttatattcatttagataaaattctttcttcaagacttaatttaggtagtacaggaattgatacttatggtttttcagcatttggacagcagataaccttaatgggtaatggaggcacaatggagaaaactagtaattatttttttattgattgttcatatttgttaatagctttgaaatatggaactatatttttaataatgatttgtatgttatttgttttaaattgcaacaaatatataaaaaataataattataagatattaataattgtagctttaattgctatgaacagcatgatagcacatcattttttagatttagcatataatccattcataatgatgatagctacccctgtagaacaagaagtatatcaagatgttaaacgtagattcaaacttgatttttcttttaaaagaaaaagattaactgctacgcaataggaaaataggactaactataaaactaaataaaaaaaacaataattaagacctttagagggtcttttttgttgctcatttttacaaatttgaaaatagagaggtgacttatgaatgaagaattaataagagataaattagaaacgcatgataaaaggcttgataatcatggtgataggcttgacaaactggaacaagatggaagagaactaaagacagaacttaaaaacttatgcgaaaatttaaaatcacttacaggaatgatacggtggtttataactgtattaggtggagctttaataagcttctttttttatgtaattcaatcaaaattattttagtaaaggtggaatgtaaaaatgaatattaactggaaatcaagattaacaaataaaactttttgggtatcacttattagtgctgtagtattacttattcaacaattaggttttaaagatttaataccttctaattatgcagatatagttaattctatattaagtatattagttatgttaggtattattgtagaccctagtacaagcggtatttctgattctataggcaacaaagaaggtgaagaataatgaaaataggattaagagcaggtcatagtgataattgcactggtgctataggtatcgtagatgaacatgagcaaatgaaaaagtattatgttgctgtaaaggcagtatttgaacaatatggacatactgttatagattgcaatagtaatgcagatactcaaaatggagaactttcagaaggtgctaataaagcaaattcagctaattgtgatttgtttataagcttacatatgaattgttacaacggacaggcacatgggactgaggcacttgtaagtagcgaaaatagttcagcttatactcatgcacaaagattagtaagtaattttgtcgaattaggatttacctgtagaggtgttaaatttgagaagttatatgaaatgaatcatattaattgtggaaatatcataagtgaaatttgtttctgtgattctcaagaggatatagaaatttataataaatattcatgggagaaattagcacatgttttatgtaacgcaatagatgagaatattcctaaagaacctatagggaataattctaattctacaggccaaggatatgttgttacaacttatctaccacacgcatatgaaggttatgatggagtagacataaattatatccttagttatttccaaggcgtcaaaccgtacgtgagaggcaatgataagggtgtatggattgaaacaggatatatgcctatagagaagtgtaatgagctaagagagattttaggaagttggttttactccatagaaaaataaatataatttaataggttaagagtgtcaagggtgtagattaatttctatacccttttatttttttaccttaaattcatttagcaggtccttttctaatacctttaggtggttgtctactctttttcgttgcatacagtaataagcaatattagcacacataaaagctaacataagtaatataaattctatcatatttcacctctttttgtttatataattgacaaagttggtaaataatatacaataaaagcaaataagtttgaaagggtgtataaattatgaaaaaaatattttcaattttacttttaagtttgactttattattgcctataggcgcaaatgcaaaaagtattgacactaaagatatcacaattgatggcgagaaagttacagtttcatggatgtatgaacgttggcatgaaataaacggtaataaatattatacagatggttttgacttaaaaacaggatggtgtttagttaagaatagagatgataatggtaattgggatcctgtacatagaacagattggtactatttcgataagacaggtaaaatgttaaagaatgtaattatagatggatatacaattggtcctgatggaaaagggttatatagtgaagctaaacataatgatttgtctaaaggtcaacaaggcgaacttgccaaaacaataacacctataggctcaggatggcacttaataaatggtaactggtattattacaattctgatggttcactattagttaatgccattacacctgatggatataaagttaatgaaaatggaatatggatacaataatactctataggctaggattaatttcctagcttttttattttgtggattaaaattatagatatatatttggaatactttgtatacattgtacatataaattaacatagtaattaaaagggaggctacaatgtatggaaaggctacgaattgtactagagttctcaaaaaagaaaatggaagacttagaactatatcaagaacttattagatattcaagtccacctgctcatgtaaaagatattttaatgggaagatgtccattgccaacattaccatcaatggataataaaaaaatacaagagtagggggagtagtccccccactgtacgcacactggttacacaagcatacccttttggggtcccaaaatatttttttgagagtgggggagtggttaaaatgaatttaagagaagtaattctaaaattattaggtagagaaccgaaaaaagaatatcaatcattacgtgatcagagactatatattagagtaaccgaagatgaaaaagaaataattgaaaaattagcaagatgtcaatgcctagatacttcaaattttgtaagatggcttatcttcggaaaatatatagatgattttataaaataatcatgatgtaattacataaaattgaattaagagaatagatcttaattttaagtgtttaaataatttttcatcttttcgaatacacttcgagtaggtatatgattttgataataatatctgtataaagttactttagatatacctaatagtccacacaatttattcttactaatgtggatatttttgttgagtacagtggataaatattgttgaaaattatccatagattccagataagaatcataaaagtatttactatgaacgttaaaaaatctagcaagctttaaggaactttcttttgtaggaaataattctccacgttcatatttagatatattagatttaccgatgttagtagcaattgataaatccatttgagttatattatgtaactttctaagtctaattaaattttcagctatagtatttctaggcaattctttaaattcatctcttaaatcaatttttacaatgtaattatttatcgctttttcatgtaccgagcatttaagggcggtacaggtgattatgtggctctctttgaacctacagcttctgcaattcagaaagagggaactggatatattcttgcatctgttggtgaagaatcaggattaattccttatacttgttattttgcaacaaaatcctatatggataaaaatccacaagtaatacaaggttttacaaatgctatctataaaggtcagcagtggttttttagtcatagtacagaggaagttgcggatagcataattgattatttcccaggtacagataaagatacaattatgacagttatagataactataaaaagattgatgctatagctcatacaccagaaattaaagaagaaaatttaaatagacttatggatataattactgattatgattcaagcttaatgccgcaaagacctgaatttagcaagattgtggataattcgtttgctgaaaaggcagctaaataaaggtcacataaagatgaaaaggtggtgattttatttgagcttgttagaaatatcaaatatatcaatgaattatcattctattaaaggtgaaacacaggctttaaataatgttaattttcaagtagatgatggtaagtttatttctattttaggaccgtcaggatgtggaaaatctacattattaaatataatgagcggactgttagaaccatctaatggtagcgttctatacaagggtgaagatgtaaaaaagaacttagataaaataggatatatgtttcaaaaggatcatttatttgaatggaatacggtttgggaaaatgtaatcttaggattaaagataaaaaagcagctaaataatgaatcaaaggaaagagtaagtggattgctagatgcttatgggctaacgagatttaagaaccatcatcctagtgaactttcaggtggcatgaggcaaagagttgcactcataaggactttagcactaaatccagagatactctttttagatgaaccattttcagcactagattaccaatcgagacttttagtatgtgacgatgtttataagataataaaaacagaaaaaaagacagcaataatggtgacacatgatatagcagaagcgatttctttgtctgaaaaagtaatagtattatctaagagaccatctagtgtgaaggcagaaattcctatacattttagcgatgaagaattaactcctttccaaaagagaagagctccagagtttagtgactattttaacatgttatggaaggagttgaatgatggaaatggctaagaaaagtgtaaatgctagtgaagtaaataagatgtctaaggaacatgaaatatatttgaataaggtaaagaaaataaaaagaaaaattttaattactagaattcttatattggttattttcatagccttatggcaaatagctgcaaatcttaagtggatagatccgtttcttacttctagcccaactagagtaattgaatcatttgtatctttatatgaaggtggaggtttaattaagcatatcgcagtcacatgctatgaaacaatcttaggattttctttaggaacaatactaggttcactaattgcagtaatcttatggtggagtccttttgtatcaaaaatactagatccatatttagtagttttaaatgcacttcctaaagttgccttggctccaataataatattttggattggaaatggtattccagcaataatagtgattgctcttttaatatcagtaataacaacaattataagtgtgttaactggatttaatgaaatagataaagagaaaattatgcttatgaatacttttagagcgacaaaaatacagatattaagatatttaatatttccatactctgttcctatcctcatatcagctctaaagataaatgttggtttatcttgggttggagtaataatgggagaatttttagtagcgaagaatggtcttggatttttgatagtatatggaggacaagtggctcagttagatatggtaatgatgagcattgtaatactatcagcaattgcatttatcatgtatgaggtggttgcaatagtagaaaataaactagtaaaggatagaagttaaaagtatactattaaactctacaaatactctcttaaaacgacttatttatataataaataagtcgttttaatttttataatgaataaaattaaacatatttttagaaacttatatttaaagtgcaattaatatataatactgaaaatataaggatatttaacaaaaaggtaacctttacttaaagtgtaaaggaattttacttatccatgtaatgatggtaaattaaattgtaaaggtcatattaagaatagagagaagttggttttttaacaaatatgcttaaataattggagtgtgataaaattgaagttatttagagaagcactaattatatttggaatttatctattaggagaatttatatcatcaatgcttcatctaccgataccaggaaatatattaggaatgataatattatttatattattatacacaaaggtaattaaagtggagagcatttcaaatataacaaattttttactagaccatctggcgtttttctttattccagcaggagttggtttaatgacgtcgcttggaataataaaagcgacatggtggcaattattattagtatgtatattgacgactataataataattggggtgactggtattgtcgttcaggctatttcaagaaagccaaggaaaaatagttagtttacgtacagataaagtgataagaaaagaggagaatatatgcaaatattaacgaacaatgttttatttggactagtactttcacttgcggcttttgaagttggtatattcattaacagaaatacaagaataccaattttaaatccactattaattgcaataggaattataatatgttttttgtttgcatttcatattgattttgatacatataataaaggtggtcaatttataaatatgtttcttggaccatcaactgttgtacttgcagtacctttatataaacagctggatcttttgaaaaagaatgctaaggctattttaacaggtatatttgttggtagcgctatagggataatttctataataggaatatcttatttagttggacttaattcaagtgtaataaaatcattagttccaaaatcagtaacaactcctataggaatatcaataagcagtcaattaggaggagttgttccaataacagtccttgcaattataatcacaggtatagttggggctgtatttggaccgactatatgtaaaatttttaagataaaaaataaggttgcagttggtgtatctataggaacggcatctcatgcagttggtactagtaaggctttagagcttggggaagtagaaggggcaatgagtagtctatcaattggcattgcaggaataatgacagtgatgattgctccgttagtatataatttagcattatacatatatcatataataaagtaaaagcttaaaaagactattaaaagttagcagtaaaaataacgggttattctaaagaaattatttagaaataatccgttattttcttataagtggcaatatatgaagtggaataggtagattataaggtaaatataagtattagaatttacaaaaaatatatttatacatgtatattataaataatgggactataaaagaggtttagtaatatttacttgttgattataggaagaaaagcaaattataattatttaagatagagtaattatgaataatttaaaaaatgatagtttatgatattaaaaaattaatgctggtgtaggagaagattaaatatggctcacgatgatgaagttcttataacttatggactagggtatgcttttgaaagaagtaaattgcttattatatctgaagttgaggaaaaagttgtatctaaaaaagaagtaaatattatggaagaaataaatatagttaacaaatttaaagaaaagttagatagtaaatgtgctttgaaatttcctaaaagctacttaactaatgtggaagaagctttagaagaaaaagtatcaaagactatacctataattacatcgataaaagccaaagatgtggacaagcagaatcatcttatggatgagtatgtaaaaaaggatctaagccagatgaggctgagaaaagaagggtatattcaaaaagattcaactttgattaaagaatatttagatagttgtagtgaaaatacatacgctaagaatattaaagaaaaatccttgaagtataacaaaatgattcttaagataattttaacaagtagttttggagatgaatttggagattttttgagtaagcgaggacaagctactattttagaagaaatagataaaaatgtaggggagcagttagagaatttacttaagaaggactatttaataaaaaagaagtacagtgaattagatttcttgaatatgttattgtttcttgaggaatggcaaaggaaatattttaaatgggatggaaagtatacggatttaatgttttcaatcaacaaggatggaagaaaatacaaggggagaaaagacgaaataaaagattctgttatttctttcattaaagagaagaggtatttgtatcttccatttgggaaatataatgatgataatatttttataaacttaagtgatgaaagatattgtaatatgaatgaaaatgatgagaagagatcacaatatgttattttagaaaaaaaagaaaccaatttatatgaaatagtatccaatgagtataaaaaaatagatttagaagaaaattcagaactaggatatttgctttgttatgataatgatacagtttatatttcttttgtggtatatgacaagaagcatgaaaaagtaatttgtaaatataataataaatttactgcttttaaatctaaaatgattgaagaattagaaaaacattttatattataagtaagttcataaaattacattaattatttacttggcggacatagggatgagctgggttattttaatttgtaaatttcggttcttagctacatataataaggctgctttaaattaattgggtatatatatatcttaattactttaaaacagccttattaattaatagaatgtgtatagtgttatttttgaggagtatattcttgatagggcatttgaattgtaactcctgtttcatcaaatttataatttgtattttcaagaggatttttattaccaactaagttcattcctatggaataaagggcttcagctgtttgattaggatcctgaaaaacagtgcctgtcataacacctttattaattaggtctttagctgctggtattccatcaattccgaaaacaggtatatattttgatttatcttctttattgtatccgtatttctgtaatgcttcaattgcacctatagccatggcatcattatttgaaattattgcctcgattttatctccatatctcaaaaatagtaattcagtagaatctttggcgcatatttcatcccaataacagaatttagataaaatttcttgtgttttaattccagcatcattaatagttgatatagagtatgtgcttcttgcatttgttacagtactattatttggaccttttaacataaaatattgtaatacgttatcaccatttctatcaatagtttttttatcagaattccattctttaacaattagatttccttgcaaaatcccagattgatcagcatttgttgatacaagaagagctctattataagatttgatgggttcagtatcaaaaggtactgtattaaatagaatcacaggaatatttctttgttttgcttttctaataactgattctacagtatttctatctaagcttactaaatttattaataaaagatcgtaatcactttggagagctgaatctaataaagcattttgtataccttgatttcttctgccatccaaaaaagtaaagctaatagaatctttgcttttattttgaatttcctcaaggctatttcttactaaagatatataaggatcatctaaagcaaataacagtgtggctacctttactggcttctctggaagaacttgtgcatttgcatataaagcagttttaagattataagtaggtataatagctaatataattatgaacgatagtatcttttttaatattttcatttcaatcctccatatgacaatttcaaattgtaagatttactattagattgtcttttaatattaaatttattctacattgaaaatatattatataaacaagaaagcagttacatagcgaaagacattgtaactgctttaaatttaaatatatatattgcaaaataattattcatcataattataaaaatatcgcaaaaattttagctgaaattgtgcattgtgaattgcaacatataaatataaaaataaattgaggattattattttttatgtactttttttttcttttttactgaatatccaaatgtgcccaatggtttagcgtttaggccataatattcaccatggctataacaaatcaagttggctttgttaaagcatatcttaccatttgaatcaattaagtcttcgtcgacctttacgtttgttacttcaaacaggaatagatcatgtgtacctagaggcgtaattgattttaacttacattctaaagctatcggcgatttttgcaatgaaggtgtggatatactttcacctttattaagttgcaaaccaaaatgtttaattttatcttctttctttccagagcgaactccacaataatcaacgatcttaaccatttctctagtcggcaaattaataacgcattcaccactttcttttatgtaatcataagataatctctcaggtcgtattcccatagctattataggttctttagtgcaaacagtacttacccagccaaccgtaaaaacattaactttatcatctttgttttttgatgtgacaagtactacaggcgtgggattaagcataacactgcctttaaaattcaatttattcatgttaattactccttaaataaaagcatcttcaaatacctaggaagaatacaacctatttttgaagatgcttaagatatattatagaaattaagtaaagttatttaattatcttcttcttctgttagaacggctatagtaatttttattcttgcgtcttgaattagatgcagcatttttaataagagcaataagagttacgataatagccaaacctactaaagtagaaatgtagataattaaattatctttaattattgaacctagtgaaatatcaactgaacctgtaacttcttcagaatgatttcttgtactataagtaagtttagtatttttattgaatagtaaactccatgcagtagaatctgttcctttataagtaatctgagattcagaatcgtttatagcatttttataatagttcacatcttgagtcaatttaattggaacagagatagtttttgtaggcccaaataatataaatggtttatattttacatcagcggttccaacactttcaccatttgctttataaacttctttttcagcagcatagctataatccataatagcatccatatcattaaattttgtcatatctgcattatcaatttgtctacttttaagaacaataccaattaactgacgcccatctctatcataaacagtcgctaaacaaccgccagcttcattagttgtaccagttttaccagcaaggttaccatttttaccaagtgttaagtttctattttctaaaattattctagaattttttaaatttataggagctttttcaagttccattgtttctctttcccaaggatttgcaaaagctgccttcatgatcattgaaaggtcatatgctgtagtgtaatgatttggatcatgaagtccattaggagtaacaaagttactattattagcgccaagttcttttgcttttttattcattaattcagcaaatgatttaacgtccccggaaatattgtctgctattacatatgcagtatcattaccagaaaaaagtaataagcccttcattatatcatcagcagttactttgtcaccaggctgcatagtattatgcatataatttaaatttaaagaatattcaggttgttcctttgcagatttagtatattcaagctgatctgctttgtctttgctttcagctaataataagccagttaaaagttttgttgtactagcaggatatctcttgctgtcagcatccttgcaataaattatctctcctgtttctaaatccatagttaaagcagcttcagctttaatgtttggtaagttctctgatgaagtttcagtcttaggttttgcagaattgcttgctgcataacttgccatacttaatggactaaataaagaaagagaaagggttaatgcaaatgcttttaaaattaaattttttttcaagtcaaatctctccacttcttttaaacatatataaaataataatcttttttaacatgccttaagtataataaaacattttaagtataacatttatgtaatgctataacaataaatgttatgtaaaaagttacaaacaatatatgagaatttacaattttgtaatatttactttagtctttgtattatagaattttttgcttttaattcgaaattatcattcaagttttctaattttacatcttctccgtatttgttcttcaaagctaaagttagaagcctatctgcaaattctggattttttgaaagaaaagaaccatgaaaatacgaaccaaatgtatttttatatatacatccttcatacccatcctcaccattattgccatatccgtgaatgcattttccaaggggagtatggtcatttatatatgttctaccagaatgattttcaaatccaacataagtttcattaaattcttcgttaaatatttctgtatttccaataaatctagtatccccgccttcggtatatagatttaaaataccaagtccatctattttttctccatttggagcagtgtagtatttacctaataattgatatccgccgcatatagctagcataactttgccatcttcaatataacttgttaaagcgtctttttttatctcatttaaatcattagagactatagattgttcatagtcttggccaccaccgaagaagatgatgtccacattgtctttatctatattttcacctattgaagtatttattatatctacatcaattcctctaagagctgctctatgttttaaaatgagtacattacctacgtcaccatatacatttagtaaatccggatataaatgacaaatagttaattccataatagtattctccttatcttaccaaagtttttttatataaccttttgaatgaagatattttctataattaatcattgcagtataagttgccaatatatatatttttttagacgcagattccttaattttatctgtaagctcttcataatcttcttttaaaataaatttatctacatttaatccagcaacctttaatcttactgccatatcatacattctaattcctgatacaaaaatatcttctatttttaaactagatattttttcgaagtctacatcccaaatccaagagacatcacgtccgtcagcgtaattatcatttaacatgaaaactgctgaaaattcactcgtattaagagcaagggtatctaaagcttggttatatccagcaggattttttactaatataatttgtacatctttattatcaatagatatttgctcttgtctgccaaagcttgaactttgattttgaagagaagctttaattactgagtcttctattccaagttcttttgaaatggcaaatgcacataaggcgttgtaaatattataagcacctgattggcttatgaaaacttcagtgtcattaattaatacagaagagttttcaggtgttaaatcaaaaattttatttacagcataagcaagttcagaacgcttgtaaccacattcaggacagtaaaattcgcctaagtgattataagtaactagattatatgaataaggtgccttgcagaacttgcagaactttgcatcagcatttatttccaatgtagtatcttctttaataggtgtattaaaaccataatatactactggattttttacatctaactttccgagtaaagattcatcaccattcaaaactagttttgactcaggaactttagtcacaccttctaaaattttaactagagttgtataaacctctccatatctatctagctgatccctaaataaattagttacagttattatttcaggggttatatgttctgtaatgaattttacattagcctcatcaacttctattaccgcataaggattttcttttttcttaaaaaaagaatagttggaaacaaaacaagctacgatacctgggtataaattggctccagtgctatttgttataacgtgtaatttattttcctttaggatattataaatcatgcttgtagttgttgtttttccgttagttccagtaactagaattaccttgtatccattactaacatgttttaagattgatttatcaatttttaaagctatcttaccaggaaaattacttccaccttttacaatgtgctttgcagaaaatgcagtaatttttgatagtaatatgcttaaaatagatttaatattaatttcactcaccgcccaattctagttatatataagaatgattaacacaataaagtaatattaatcatttttatacaattaaacaataaaataatcaaaataagtatagcataaaatttaagaagtacgaaaacttttttagcaattgaatagatataggttgtttttcgtaaatttaaagaaaaagtgcaagaattcaaggttcagttaacctaacataattgttttattagtgaatataccatataattagaagtaataaagaattttacgaggtgctattattatgattagggtaacagttaatataaatggtatgaattataacttaaaaggggaaaaagacgaaaaatatttgcttggggtagcaaattttgttgatacaagaattaaagaaattctgtctaagaaagctagttttagtacaacagatgcttctgttttagcagcggtgaatatagctgatgaactttacgagtgtgatttagaattagataaagcaattaaaataaaagaagccattagtggtgaaaattcttcgttaaagaagaaagtagacgagcttagcttgcagttagaaaatataagtaaagaaaaatcagaacttcaaaataattttcagaagaaagaagaagaactacatgggaaatataataatgtagaagtaaaatatagttcgttaagtgacgaaattaataaactgaaaattgaaaatgaaaagctgaaaaaagaaaataaattaataattgatgagaataagagaaataagaatagtaatgaagccttaacaaaagatatttcagactataaagagaagagcaagattctttataagaagatagatgaggctaaaaacaaagagcatagattagataagcaagtgcaacaagctaatgaacaagtaagtagtttaactagcgaacttactaaagtcaataaagaaaaagatatggtagctgaacaattaaatgaaatgactgccgtaaattttgagttagataaacaaataaaagaacttactcaaactaagttaaatttagaaaataagatgcttctattacaagaaaagaatatctcgctagaagctgattataataatgtttgtgaggaattaaaaaaagcaagtgaaagtttaaaacaagaaattaataataaagaggttataaataaagaatatgctttatgcaaagcaaatttagaaaaattaaatgaggatcatcataaatgtactaaagaacttgcagagtataaggaaaagttagaaaatcaaattacgactaataatgcaataacttctaaagctagagaagaaaaagaaatactaaaaaataaaattacagaattgttattaagtgaagaagaattaaataagaaaattaaaaaattacttgagagagagcaggaattaaataatagtttaaaacttgaaaaagataatgctgttagattaacaaaagaaattcaagataataatatggaaaaagctgatcttaataaacagctaaatgatttatttgaagaatcggagaaagagattacagaatgtaaacaaaaattaagcaagctaaataaagaaaatgaagctttaataagtcaaattgatttattaaatgaagaaaaggatactttagtaagcgaaatgaataagttaactaaggaacaagagattttaaataatgaaattaaaaatataaatgatactaacgataaattatcacaagaaatagagaattctgatagagaaaaagaaagattagaagaggaattaaaaataacaagaaatgataatgaaaagctaaaaggtgagcttaaagaagttcatgaagaaaaagaaatagaagttaatattaaggcaaaagagattgaggaagtaagtaatacattagagagtaaagaaaatgacttaagaagaattaaagaagaattagcaagtagagagagagccttagctagattagaaaaggaattagaagataaagaaggaattttcctaaaattaaaaagagaaatagaagctaaggaaaaagacttaaatacaagcaaggcatcaatagatgatttacaaggaaagatgtcaatactatctaaagaaaaagaagaattaactaatgaaaatgataaacttaatcaagaagcaagaacttttcacaataggttatttgaactacaggcagaaataataaacaaagaaatagagattgcaagagctaaaaaagaacaagtaggtcctattgtaaaaaagaaaagataatcaatgaaggagaaatatgaataagatagaattactggctccagcaggaagcatggagagtttaattgctgctataaataatggggcagatgcaatatatcttggtggaaataaattttcggctagagcttatgcatcaaattttgataatgaaacaatgatgaaggctgttgattatgctcatagctataatgtaaaagtatatgtcactataaatacaattttaaaacaaagtgaattaaaggaagctttaaaatatgtaggatacctttatgaaattggagtagatgcaataataatacaagatttaggtttagtaaaattaataagagatgtgtatcctgattttgaacttcattcatctacacaaatgacaattcataatgcagaaggagccttatactttagagaaaaaggaatgcagagaatagttttatctagagaacttacattagatgaaattaagtacatttcaaaagatttaggaattgagacagaaatatttgtgcatggtgctttgtgtgtatgttattcaggacaatgcttaatgagctctatgattggcggaagaagcggaaatagaggaagatgtgcacaaccttgtagaatgcagtatactttaaagggtgaaaattttggagaaagaaaggcttatcttttaagtcctaaagatacatgctttattgatgatatggaggctattataaagagtggaacttcgtcattaaaagttgaaggaagaatgaaaaagccagaatatgttgctggagttacaaggaattatagaaaagctattgataaggtattagtaaatacaaagtttgatttacaaaggggaagacaagaattagcacaactatttaatagagaaggttttgctaaagcatatctatataaaaatgtaggaaaagatatgatgagctataattaccctaaaaatactggtgtatatataggtcaggtatctaacagtggagaagttaaactagaagccagcgtatctttgggcgatggtataaggtttaatgacgatggatttactttaagtaaaattttaaataataataatgaagttaaagaagcttttaagggcgaaacagtcaagttatttccaactgggggatataaaaaaggctataagctatataagatgtctgataaaaaactttatgatgagttaaatgatgatttaaaaccttataaaaggaagataaatttagctggagagattgaatttaaagttaatgcacctctttgtattaaagcaaaatacaataaaaaagaatatagagtttatggggaaatggttgaagaagcaactaataagccattaacaagagaaagagttgaagaagctttaagaaaatcaggagaaattccatataaatttgacaagatatttttcgatatttttgatgatggatttataagaatttcagctataaataatctaagaagagaattatttgaaaagattttaaaagaagaagtaagttcatatagaaggaaaagaacagaagggcctattaaagaatggaatgcaaaatgtcaggaaaacttaggctatatttatagttgtattacaaaagatcaattaaaggcactacttgaggataataaagctcaaaatatagcgttagatatatttttcagcaggcaaaaacatgcattgaataaaaatgacttaaagaatttatatgagacttcaaaagataaaaatatatatttaaaagttccaagtattattaagcaggaatttaatagcatagtaaagataatagatgaactaaaaccttatataaagggaataattacatctaatgctggaataataaaaatctataaagataaactatttataataggtgattataagttaaatatatttaataaagaagcggctgaattttatgcgcaagacgttgacattccattcttaagtcttgaactaaatcgaaaagaaataaaagaattaatgaagaacactaactgcaacatgggaataaatatttatggaaaaactgagcttatgattagtgaatattgtcctatgggaagtacttttggtaataagtcatctaaaaaagaatgtagtggtgtgtgtatgaaggacaactttaagttaatagatagaatgaatgaaagttttactgttttgggtgataatagctgtagaagttatattttaaattcaatagctaccaatttaattgatgaaatggaagaacttaagtcttttaatatttcaaattttagagtagactttaaagatgaaagctatgatgaagtaaaagatgttttaaatcaaattgcgaataaagcaaaaaacgaaaataataagtatactaagggccactacaaacgtggagtagaataataccaagaaatagttgacggcttgtaattgataattaagatgtagataacattgaaacttgttagtaagaaattattttaagttttataagtataaagtcttaattatctcttatatgctgtcaattgttgattgattgttaggatgtgggatatatgaatgaaagatctctaagaattttagagtttaataagataaaagaaaaaattaagaaatatgcaagaacaaatgctgctaaagcaaaagttgaggctcttgagccttatgataatttatatgaaataaataataagttagaggagacaaatgaggctcttgaaatcttaatatcaaaggggaatccaccacttgaaggattagctgatatacatgaaggtatagaaagagctaaaaagggaggaaccttatcaccagggcaattattaaaagttggtggaatgcttaaagctacgagaaatatgaaggaattctttaaaagagaagaagttgaaaagtcatatccaaaacttgaagacttagcttacatattggctccagtaaaagcgttagaagacgaaatagaaagagctatagtatcagaggatgaaattagtgataaagctagccaaactctttataatattagacgaagcttaaaagaaaagaactcttcagttagagaaaaaataagttctattgttagaagtaactcaaaatatttacaggatgatttatatactatgagaggcgatagatacgtgcttcctgtaaaatcagaatataaaagtcaagttccagggcttgtacacgatcaaagttcaactggagcaacgttttttatcgagcctatgagcttagtgaatttaaacaatgaaataagagaactatttttaaaagaaaaagctgaaatagaaagaatactttctgatctttctctgaaagttaaaattaatggggactcatgtttgagtaatttaaaggtacttgttgaatttgactttatatttgcgaaaggaaaatatgcatctgcattaaatgctataaagccgatagttagagaagatggagcatttagcatattatctggaaggcatccattaatagaaagtgataaagttgtgccatcagatatatatctaggagaagaatttcaaacattaatgataacaggaccaaatactggaggtaagactgttacaataaaaaccgttgggttacttcatattatgggactaagcggattattaattccagctagagataactcctctatagcattctttaaagaaatatttgcagatataggtgatgaacaaagcattgagcaaagcttatctactttctcatctcatatgactaatatagttaatataatgaagcatgtggatgacaagtcattagctttattcgatgagcttggtgcaggtacagatccagcagaaggagcagctcttgcagtatcaatattagaaactttaagaaatagaggcgcaaagctaatcgcaactactcactatagtgaacttaaggcttatgcattaaaaacagagggtgtagaaaatgcttctgttgaatttgatatagaaaccttgaggccaacttatagattattaattggtgttccaggtaaatcaaatgcctttgagatttctaagagattaggacttgtagaaggtgtcattaaacgcgcaaaagaatacatgtctgaagaaaatcttcaatttgaaaatctaatcagagaacttcaagaaaaaagtataatagctaaaaaagaagcaagagaagctaagatgcttagagatcaagccgaagatcttaaaaagaagtacgaggaaaagcttgaaaaattagaaaatactagagaaaaagcttatatggatgctaggcgtgaggctaaagagataattgcaaatgctaaagatgaagcagatgatattttaaaagctatgagagagcttgaaaagcttggaatagcaggcggtggaaggcaaaggcttgaagaagaaagaaagaaacttaaagatagcttagaagaaagagaaaaaggaattcacaagatgaaggaaaatgaaggggagtctataactaatgtgactcttggtatggaagcttaccttccttcattaaaccaaaaagtaattattgtttctatgccagataacagaggcgaagttcaagttgaagctggaataatgaaaataaatgttaagcttaaagatttaagaaaaactcaagttactaaagaagaaaaagtaagaagaaaaagagaagtaaagcttaatctaagtaatgtagaatccagagttgacttaagaggattggatgcagaagaagcatgctataaagcagacaaatatttagatgatgcatatatggctaacttaggagaagtaacaatagttcatggtaaaggaactggagtacttcgtaaagcaataaatgatatgcttaagagacatcctcatgtaaaatcatatagactaggtgcatatggtgaaggtggagacggagttactatggtagaacttaaggggtagttattttttcatatacctaatatttttacttatttaagttaaaaatatcattaaaattattgttagtaagaatattatacaaatattaatgtataattaagtaaagctataattaaatttctcttaagtttttgttttatagtgttaagtgtacgttagataagaggtgataatatgtacataataagtgcatgcttgtgtggagttaattgtaaatatagtggtaaaaataatctaaatgatagatgtttaaaattatttagagaaggaagagcggttctagtttgtccagaacaattaggcggattaccaactccaagaaatcctgttgagctaaatagtgcagcaagtgaagtgttagatgggaatggaaaagcattaagtaataaaggtgaggatgttacaaagcaatttatagatggtgcatatgaaacattaaaaattgcaaaagaacttggagccacaaaagctatattaaaagaaggaagtccttcatgtgggtctaactttgtctatgatggaacttttacaggtaataagataaaaggcaaaggaattacagctcttttattggagaatgaaggtataacagtattttcagatgaagatttagaagtaaacaatagtaagttagtatatcttaacgagtttgatagagaaaaggctaagaaaagaagactttttgaacaaggagaagaagaagagtcttatggagaagaatattttgatttaacagaaaatttaactgatatgtctgagcttcctccaactgttgaagaaaatgtgaaaaagcttatgatttcattagctcgtgatttaatgggctttgaagaaattgatgaaattgcagaagccacagggctgagtgtagaggaagtagaagaaattttagaggaagaataataagaagcaaatatatattaattaatatatgttgattttgttaattcagatattactagtatttgtttaatccccatgatagattaaattatcatggggatttttagcgtgtgtaagtttttgtatgtcttaataaggattataatgaataattaagaatcgtgtttaaaaagtactttaatgtcagttaaagaaaagttaagctgttacataaagaattcctttgtgatgtaacagcttttcttagatcttttagatggagtataaaaactaagaaatatttttaatttaccttacatcagtgttattacaagaatactggaattcaggctgagtttgaagataaaatccgtttcttacttgggagatccaattttgaaatatttctagccacgcattacttgtaaagaaatcttcaagtggtcttgtaggatcccactccaaaattagaaatggacctataccaaatgaccaaatgccactttgttctactccagcttctcgtataagaagaataggaagcccgtattgataagccatagctggttcaatttgagcaaaaggactaccctcaagagcaaattgattttgaggttgaccaagattattttgaattatatacacctgtcgttgattaagattaagtgaaataaatccatagctagatagcatcattcttctgatatttgttaatggagtttcgggatattgttcggttactggtagggtacgtggaaataataaagcctctcttattttagatattatagcatcaacaaattcttgttgaatagaattcaatctacttggatggcttaggaatacaggaactctaaataaaagatttgatgattcctgcattaattcagttggctttacgccagtatattgatttatagcgtctccttcatatattttagtcatttgttttcctccataatattattttatcttaagatatatattcttgaactattaccatgaattattatatgtaaacaaaagtgttaacgttacgataatgttttaattttagataaaaaaactttatgttgaaaaattcaagtattattgatgatattgttgaagattaaaaaattatattcttacttttaagatcttttttagagatgatgcagatattcagtgattcattttaagtaatagaaattttcatatttttatatattcctagatttatatatttataggtttatataaaaatatgaaaatatataaatatttataggaaacatcaggggtttggacattagagagtaaagtgaattctagatggaaattgattaataacgtatatagatttaggcttattttcatgtgagaatatgaatataaatgagataaagatatttcaaaagaagattcacgattttggatgtaagtatgtcttagtaactatggggaaaaatgggcaagtattttttgatggcaataaatactataatagaaaagtgaaattagttaatccagtggatacaatgggagcaggagattctttcatcgcggcatttattgttactttgttaagatttgggtggaaagataataataaattaactgaaaatgaaatactcagtgcatttgaaaaggcaagtaattattcggcagatatttgcatgattgaaggtgcatatggatatggaaaacctataaaggaaaagagataattataaaataaaaaaatatatttatatgaaaattataagaaacattattataaagcgaacccaattaagtagagaaagctaaaaacgctggaagaggatttacttaaaagggttcactttatctgtattcttattaagagaaactcaaggtatataataaaagggagttcacaatatattattaaagctaaataaatatgaatgaattattgtagccagttttgggctataggataactaattggtattttaccatcatttccaaatcctaatgtatgagctgaagtatgaaaatcactgcctccgctttttaacaggttatggccgtcacaataattaattatttcattaatttgtgagtgagaatgcttacgatgtatgcattcaataccatctattaagtttaatttgacaatactgtcgatataattatatatgttatctacgtcatatacataaggatgagctaaaaaacatttaccgtctgaactatgaattgtttctgcagcttcatagatagttggaaggtcttctgttggctgtatataaaatggactattagggtttaaatagtgttttctataaaaagttgttctatcagtgatttctaatttttttagaatatacaaattttcatcatagcttaaaatatcatcacaaataacatcgttagcaggagtatttctggcctttatatataaattagaggaatgtagaatttttagttcattacaaacctttattaaataatttaatttagaattttctttttcaataacattaatatttttattaacttgtaatattcttgatttttctatagaatctatattaatgttataccctaacatatccatgctgattccattaaatgaaaaagcaatttcaattcccttaattatgttaccaccgtataaatccgttatatttaggttgttaatttttttatatgcatcaacagattgatgatctgtaaatgaaataaattctaaattcttttcttccgacatttttaatatgtctattacatcaaaatctccatcagaattatttgtatgaatgtgtaaatctatcattaggcatttctccttcattttaaatcataaggaattataaacaattttagatttatttattttaaggaaactaggtaagtagttttaaagttatcatatcattaaatatttttttagacaaatagttaatgagcatagttgttttttgaattagttatagaaagatagttgttttatttgtaaaacttaatatgatagatatattgcaaaagtaattcttcatgataattctaaaaatattgcaagaattttagccgtaattgtgaattgtgaaatgtgcattgtgaattgtaacacatatattaaatatataaaaataaagagtgagttttgataaagggaaaataaagacgtgcaaaaaataaaatatgttaaatatgattgagttttactaacaatgtgataaaattatataaataatttgatgggatgagataaaaattttagagggaaatgttttttattacttgaacaaatgataaatacaatggttaaggaaaaatgtagattcatttaaaataaatttttatatgtattggagggaatttatgattactaaagttttggaatttattaattcagaagctgtatttgagagtcttaaagatttggaaaggtatggaggaattgagacggaatatatagctagcaattttaagatgagcagaactcaagcaagcagattattaaatgaattggtgaaatctaacgatttacttaagataaatagtcgcccagttaaatttcttcctagaaaaaaaatcaatgatattattgggccaacaaagaaaagtatatataaagatatatatgaactagaacaggaatgtgagtcattaaaacaggaaattatttttgaaagtataattggttatgataacagtctgaaggaagttattgagcaaatcaaaacggcagttttatatcccaaagggggattaactgttatgcttacaggtgaaagtggagttggtaaaagctttttagcagagataatctacaagtatagtgtaagctgtaatgttttagaaaaagatggaccatataatgttttgaattgtgctcagtattataataatcctgaactattgtcaggtatattatttgggcacgctaaaggggcatatacgggggctacagaatcaaaagcagggttaattgaacaatcagatggcggaattttatttttagatgaagtacatagacttaatagcgaaggacaagaaaaattgttcacatttatggatacaggagtattttcaagaattggtgaaaatggcgtaaagagaaaagcagatgtacgattagtttttgcaacaacagaaaatctatctgaatttttgccaacttttttaagaagaatacctattaatatatatatccctaatgtagaggaaaggggacccatcgagaaaaggagaataatagaacattttatatatgaagaaagtaagatttttggaataccaattgaaattacacagcttacattaaatacaattctaaaaataaaatttaaaggaaatattggagaatgtaaaaatgtaataaaatatgcgtgtggaagagcatattcaaagaggcaaagaagaaatgggaatatatttgtaacattgcaggatataccaagaaacatatacattgagaatgcagaaatttttaagtttcaaaacaataataaaagcaaaagtattgtattttcagacaataacaatagacatgttcaaacatatgaagagagtaagcaaagcataattaagcaaagtatattagagtgttttaagttgtataaattagttgaaagtggagaagtcagcaaagaaggattttatgagaagagttccaatataatggtcaacttgatggataggctagtatttgctaataatgatgaaactaaaaacgtaattatagaattcataatatcaacaatgcaggatatatttagaaatctagaaataaattataatattaaatatgatgggaataatgtgctggctttttcatcatacctatactcaaaaaatgatttttatagcttagatgaagaggaattaaaaatagagaataagttattgagctatttaaagagagaaaattataaagaatattctgtagtatataaaatagcaagttttatagcaaacaggttggatatttatttaactgacagtgatctaattattatgattatattcattaaaactactgcaatacgtataaattttaataaaatgaatgcaataattattgctcatggatatgcaacagcaagtagtatggctaatgtctgtaatcgtattataggtgtaaatgtatttgcatctattgatatgccaatagatgcaacagcaatagatgtgcttaagcaattgaacaggtatattgaagatgataaattaaaaaatggcttaattgttttatttgatatgggctctcttagcttaatttatgaaaatttaaaagataagattaatattccaatgctttgtatagatcaagttacaactgtgttagctttggaagtaggaaatttattaatacaaggaaaaactattgaagaaatctctgaagtaatgaatgaagaaattaaacctaacatacagttattttatcctcagaagaataaagaatatgcaataatagcatcttgttttacaggaataagtactgcaattaagatacagaatttactttcagaaagtttagcaggaatagttgatgtaaaggtggttccgtatagttataataatctagtgtctaaaggaaaggatgactctatattcaagatgtatgacgtattagctattgttggcacgtataatcctgaaattgagacaattaagtttatatctttagaagatattatatcaggaaaaagagaagatgaggtgtatagaattttcagtaaggtagcaggacatgaccaaattaaattaataaatgattctattgtgaaaaacttctctttgacaagagttatagatagcctaactattttagattctaataagattatagagagaatagaggatggtatcaatgagtttgaaaacaatcagaaaagaaaaataccaaatgacaaaaaaattgctttatatgttcatttaagctgtatggtagagagattagtaagacaggctgagatagaagaatatacagatttaaatttgctaattgaagagcatcagagtgagattaagctaattaaaaattcatttagtgtgatagaaaaaagttatagtgtgcaaataccaattgcagagattggatatatctataatataatatatggaccaattcaataattccaagcaattaagagaacaaaataaagttttataaaaagcatgtcactagttggcatgctttttgcttattaataaagtataaataaaaaaattaaaggaggtgatggcaatgaagaaatttctaattgcgactcatggagaattatcaaaagaatttatagaaactagtaaattaatagtaggggcattaagcaatgttgaatatttctgcatgactaaagataaatcgggagatgatgcagaaaaggaaatgaaaagaattttatctaataaaagcgaagaagaaaggtatattgttttaacagatatttttggtggaagtgtagctaatttatgtaccaatttattgttgaatggatatgaatttgaattaataacaggtataaatttgccaatgattttaacaatacttttatcagacgaagatgatatagaaacattggtaaggaacggaatagaagaatcaagaaaaggaatcattcatgtaaacgaattactaaaaaacaataaggaaaggaatgaagaagatgatatcattgatgagaattgacgacaggttaatacatgggcaggttgcatttggatggtcaacatcgctagggataaatgtaatattagtggttaatgatgaagcaaaaaatgatcaaatgaaagctatggcattaaacttagctaaacccaataatgtaactttatatattagaggagtacaggaatcgggtgagatagtagagaaatttgctcaatctaagaagaataatgtacttgttttagtgaaaaatacaaaagatgcattggaactagtaaaaaattcaggcggagttataaaggaattaaatgtagggggcttaagatatgaagctgggaagcagaaactaacagatttagtggctgttgatgaaaacgatgtatcaaatttaaaagaaataaatgatttaggcatagaaatcgaatttagaatgctgccaagggataagaaaaagactttatcagatttactaaaataagtaaggaggtaaaaaattatgatagcacaagcaattatgctgggattacttgcaggaataggtatactggatgggcggattttggggcagataatgcttgaaagaccgataataacaggtgctttagtagggctaattttaggagatttaaaaacaggtattattataggagctcaacttgaacttatatggatgggtattgcaggaataggtgcagcaacaccaccggatgttgtaacaggtggtgtgttagggacagcttttgcaatattatctggaaatggtgttgaagtggcactagccttggcagtaccgattgcagttttagcacaatcactaggggttttagtaagaatagtgaattcttattttgctcaaaaggcaaatatatatgctaaaaaagctgatttcagaggtattgcaataatgatgtggattccagtactattatttttcctaagtacttttattccaacatttttagcaataatgttaggagcaaatgctgttacagcattaataaattctattccaaagataattttagaagggcttggaatagcaggatcattattaccagcagtaggatttgcactattaatggatatgttactttcaaagaagatggctgtatttttcttcataggatttttattagcatcgtacgctaaattagatataacagcaatagctttatttggagcatgtgttgcatttatattaaatatttacatcaatacaaaagagaataatacagttaagcaggcagttgcgaataatttaacggaaggggagattgactttgaataagctaggtaaaaaggaattaagaagtgtattttggcgttcattcgctcttcaaggagcatttaactatgaaagaatgcagaatttaggctactgttatgcaatgttaccagttattaagaaactttattcaaagaaagaagatcaagctaaagcgctggaaagacatcttgagatatttaatacaactccagtaattgttccgacaatattaggaattactgctgcaatggaagagcaaaattcaaataattcagattttgatgaaggcgcaattagtgcaataaagactgctttaatgggacctctagcaggaataggagattcgctcttttgggggacatttagaattatagcagcaggaataggtgtttcattagcaagtgaaggaaatatatttggtccaatactgttcttgctattatataatataccaggttttgcaattagaatactgggattaaaatatgggtaccaattaggtgttaactcattagaaaagatacaaaaacaaggattaatggaaaaaataatgtctatagcaacaactgttggattatttgttgtcggtggaatggtagctactatgttaaagataaagactccgctggtattcaatttaaacggtgcaaaagtagtagttcaagatatattagataaaatattgccaaacatgctgccactattatttgccttctttatttactatctattaaagaagaaaataagtattactaaaatcacaataggtgtcatagtaggtggaataatattgcatgcaatatggctattataataaaaaataagagaaagaggtaataaaaatgagaatacaagattatatgttagaaactccaactaaaatgaaggagataatctcaaaatctgatgaattatttaaaaaaataataaagcaagacataaacaaaattataattacaggatcaggaacaagttatcactcaggggtacaggtgcaaacttatttgcaaggaatattagatgctgaagttacagcaatgtatccatttatgataactaaagatacattcaaaggtaaaaacgaaaaaacattgataataggtatatcacaaggcggaagtagttattcaacttataatgcaatgaaagtggcaaaagaatgtggttgtattactgcatctatggctggatgtgaaaatgcgctaatagatgaggccgcagattatattttaacagtatactgtggagaagaaaaagctggagctaaaactaaaggtttttattgtacaaaattaaacttaatgcttcttggacttaaattaggaaaagaaaatggacaaatatctgaagaaaaatacaaagaagaaatagataaaatattagatgctagcgatagatttgaagatgtatataaaaagtcagaacaatggattgagaaaaataaaagcagattagtagaagctaaagaaataagaataataggtccagcagaattatatggcgatactttagaaagtgcattgaagttattagaaactatgagagtgcctgttacaggatatgaatttgaagaatttatacatggtatatataatgcaataaatagtgattcaacaatatttatattagatacaggaaaagaaccaagagtagcaaaaatgattgaagttttatctgagtggacaagcaacatttacgtaataggaagaaatgttgcttcggatgatagaaatctacaaataaatgttagcgaagatgaacatcatcaaacatttaatttcatagtgccaatgcaattgatatgtggagagatacctaatttaagaggtgttaatccgagtataccaaaagatcctaaattccatatgaaacttggaagcaagagatttaataaatagtctgtaataaaaataattgttaataagttagttgcgtaaaaattctacaataattatttaaacgtattgatgaaaaaaatattattaggctaataatttattttgagttttaatttaaattaaatatattaagttttttgtaaaatttagaacagtaaatagtttttaataaaaataaactatttactgtttcttctatttgaaaagagactacaatacaccattttttatatcaattctgattaactacaaatctctatattattctttggttatataacacttttaattttttaaagactatgcttaataatccaaagaatacactatctcttgttgctataagaattataaagtaaatactgcagcaagcaagtatatcaaggatacaggataatatagttccagatataaaattatttataacaaaggttattgggataaatattaaagagtaatataaatacttaaaattctcaaaagcaaataatcttatatttatgttaagttcattttttactaatctatattctaaggccataactactaaatttgaaattaaagttgttgcgattacttttgttggtgtgaacatattggtaaatattaaaagagtattcaagatcaaatttaatatccctccaatgaaaactaacttagcatctgttttttctcttccgaaaatataaattatctgatctgaaataattctatcaattccaatagtcagcatatatattgaaaacaccattagtattggtacagctggaagatagatatcagtacctttgcccataattataataacttgtttagaaactccaagtaatcctattgaggctggaaataagaacaagaaatatattttgattaccttatttaataaattcaaatagatttcttttgaatgattttctaaatagtttgaaagtctagccatggaaacttgaactattgtaaacattaagatatctatcattgacattatcttttgggccactccataatatcctgcttctgttgatcctaaattgctatttagcatgtttttatcaagccaagtatataaaatatatgtgttggcaagtattacaactgaaaacataggttttatatgtttttttatttgtaagtctgagaagtcaaagtgtatcttcttttttatatatataaaactggatatgttattaataaaatttataccacaagtaagatatatgtaaaataaaaaatcagcctgagtttttacaaaatatattgttaataaattatatatgattttaattatcatagtttttaatgctataaaatcataattttcaagagcttcattaatccattcaacattaaacatattaaagactatgtttaatcccataaccatgcaagtataaaaatatgaatcatttctatggaatatagttaaaaagatagcataaaaaatagaagttacagctgttgttgtggtggtaattacaaataggctagtaattgttttggttagtttatccttatcatctcttactttgcttacttctcttaaaccatattgatagactccaaagcttgcaaaaatcataaaaactgcagtccaggtttcccccatggtcatatatccatttaatttatcttgaattgcactaagaactattggcataactattataggcaaaattatatttgaaacatttaatacggctttaaaaaaagcatttttagatattgatctagacataagtatctccttaaaatatattgtattttgaagtttgcaatattatggtaatatagtaattgaattgtttcaattactatatataaatgtctaagataattgaaaaatataaaatattgagttgaatataattcaacttatttgattatcattatatgataacaatatggagtgaggaatttgaataaagatttatatgaatttaaagaaatagatgaaaagataaagaacaaattaaattatattaaagctgattcagatattatgtataacaatattaatgaagtaaaagcattaaaaaatgatatatatgaaaaaacatctaaggtttttacgtacaatctaagaaaattaattcaattggaatcaacacaaaaaaagttggctggtaaaattggtatatctgaggatttattatctaaatacaaatcaggagatgctttcccatctatagaaacattactatatatttctgaagtatataatataacaattgaaaagcttatttctataccactaacagcagaagatattgagaacttagaaaataataatgaaattggatccgatatttttgaagagaaatactacgtttatttttttgttactaatatagctaaagaaggatctttgcatgaagggatcgtagaaattaagaatgaaaatgtaaattttaagatttgttcagatggcaaggtaattaaatattttacggggaagtatattgtatccgataaaatgatattttttaatttaagcagttcaaatgatggagttacatatataaatatgattaaaccaaacctgaataaaaataaatatatcggtggtgttgctatgatgatgcttccctcagacgcaaatagtaaaccatgtgttcaaaagattttatttagcaaaatcaagttggatagggaattatattacagtaacctaaaggagattttaaattttaaaattgatggagttaatttaggtcatgttaagctatctcagtgggaagatgaggcggcgtataattttatattaaaggtattatactagcttatcatgcttgtagtaaacttaagcgtataaatggattaaatttaagttaagaacgttcaaatcacatcttgatgaagaaaaacaagaagaattcaaaagaattggttgataaagagataaaaataaatatcaacatacagcaaaatgctggtgttaagtctatagtaaccttagattatgtaactggtaatgttcattgtgaagaacatgaaaggtatgatacaaatgtatcaaaagaaatattggagaatgtaattaaagaaaataaggagtcgttgtctcactatcgattaaatataatataaaggccttcaaagttgaatctttgagggctttattttatgcgcttttaggttcatctaattttatttaatgatttaagatcacgaacaacttatgatttcaaataagatcattgccttaattattcatagttttaataaaacttacatttgatattttgggaaggatttattacattttatgagaaagttaaataaactcgataccacactatgtggaaaaaataaacataaaattttacttacaaatagtagtagtgagaattatgcataattaatatttagaattaaaaaatataagtagaaactttagtttgataaatttactttaaatacatacttatctccacggacaattgaactagtatattctattaactcatcttcttcataactaaatctttcgagaagtgtacatggagttttagtggaaatgtttaacaattcagcttgccaagacttggggagaattggcttaaacgtttctgatgctcgatcaacatttaaagaataggtcgattttaaatatgcatatagtgaaccgttttcaagcaaagtttcttctattttgaaaaatctatttttaggcaaatacgttgattctatcatgagaggagaattttcaacagttctaagtcttactattttatgaaataattcgtcctttggcctatttaaaatggaagatagattagtatctaaatttataatgttataacttattatagaattacatatatccatattattctttttaagttcatctgtaaaagaatagaatttatatagggattgctcaaagatagaaggtttaacatatgtgcccctgccttgaaccttatagacataaccattttcatagagcaataacatggcctgcctaatggtagaacgacttacatgatatagtgaacataattctctttcagatgctattggagaattttctgaataaactcctttttttatgtttgacaaaatatctaaataaatttccatatacaatgaattgctgctcatttcattgctcacctcacttataattttgaattaaataaataataacacaaaaaatagattattactatgaaaaaatagtaccactgcaatgagtggtatgtccgcattttagtaacaactttggcatgtgggcgataatccctctaaactattgaaaactttttcaaacacccatataatgaactcataccaaatcaaaattaaaggagatgaacgattatgggaacaccaaatattttactaacacgtattgacaacagacttgttcatgggcaagtaggcgttacatggacaacaactttaggagcaaatctaattatagtagcagatgatgaagttgcagaaaatactttgcagcaacaattaatggaggttactgcagaatcatcaggagctggcgttaggtttttcacacttcaaaaaacaattgatgtaatacacaaggcagcagaacatcaaaaaatattcatagtagttaaaacaccaagggaggtaagaaaattaattgaaggtggagtaccaatcaaagaagtaaatgtgggaaatatgcattttgataaaggcaaaagacaaataagtaaaaaagtatatgtagatgacaaggatatggaagacttaaaagcaattaaggacatgggaatagatatctatatacaagacgttccaggtggcatgaaagaaagaattaattagtttaaatattaggaggaatttatatggaaactattactttaatgcaaggtattggcttagcaattatggcaataatagttggaattgatttttggttagagggattatttatatttagaccaattattgtttgtacattaacaggaattattataggggatattcaattaggattacttgcaggaggtttaacagaattggcgtttgctggattaactccagctggtggtacacaaccaccaaacccaattttggcaggagtaatgacaacggttatagcacatacaactggaaatgatccagctgctgcaatagggctcgctttaccatttagtttcttaatgcaatatataatactattcttttactcaacattctcagtttttatgaagagagcagataaatatgcagatgaaacagatataaataaatttataagattaaatattataacaacatctatagttgccataacttacggcatagttgttttcttatgttcatatgttgcgcaagatgcaatgagagctcttgtacaatcaatgccagaatggcttacacatgggtttggaattgccggtggaatattaccagctgtaggatttggtatgcttttaaaagttatgttaaaaggagaatttataccttttataattataggatttgttgtagcatcttttgtaccattttcaaacttattaccagttgcaatcgtaggtgtggcattagcattattcgtttataacttagataaggataaaatgcttttaagcgcaaatgtaaataaaaataagggagatgattacagtgatggaatctaagaaaaaggtattaaataaaaaagatattactaagctcggattaatgtcatcattcttacaagcaagttttaattatgaaagaatgcaaggtggcggatttacattagctcaattaccagctttgaaaaagatatataaagatgataaaaagggtctttcagatgctatgaatgacaatttggaatttataaatacacatccgaaccttgttggttttttaatgggattattaatttcattagaggaaaataaggaagatagaaagacaattaaaggtttgaagttagcactatttgctccaatagcaggtataggtgatgcgatattctggtttactttattaccaatagtagcaggtatttcagcttcctttgcaatggaaggaagtattataggacctattatattctttgcaacatatgtaacgatatttgtattacgtattgtttggacacatcttggatataatcttggagttaaagcagtagaaaaaattaaaaatacatctcagataatcgctaaatcagctacagttcttggagtaacagtaattggaggattaatagcttcatatgttaagattcaagttttaactggaatagttgtaaatgaaagcaagacagttttaatacaagctgatttcttggataaaattttccctaatatactatcaatgggatatacattattaatgttctacttcttaaagaaaaagaaagttagccctgtaatattaataatgactacatttatcatggctattgtattatcattctttggaatattgtaatagttgaagtaagttaatatttttcttgattaaaaatcgacttaagaaaaattatatatattaatttagtaaaatttgaaatataaaaaggagaaatgaaaatgatttttggaaaaaaagcacaagaattagaagaaataaaagcaatatatactgctagagaaataagacaacaaccagatctttggagagaaacttatgagatagtattaaatcaaaaagaagctatacaaaaattcattaaagaaaacattgatgagaatacaagaattattttaacaggagctggaacatcagaacacgttgggaacactatctatttagagttaaataaacgattaaatgctagagtagaagctatagcaacaactgatatagtttctaatccagaagaatatatagaaaaaggaactaaaacaatagtagtttcttatgctagatctgggaattcaccagaaagtgtaggaacatatgacttatttgaaaataatgtagataatattttccaaatagtaataacttgtgataaagatggtgacttagcaaaaagatgtgcaactgatgaaaaaaatctgcttattttaatgccagaaaaatcaaatgatttaagctttgctatgactagttcttttagctgcatgacacttgcttcacttcttgtctttgacatagataatatagaaaagaataaggagattattgatataattgcagcacaaggagaagatatattagagaataaatgggaagaagttaaaaaactagttgattataaagcaggtagaattgtatatttaggatctggtatgttaaaaggcttatgtaaggaaatggcacttaaaaaccttgaacttacaagtggaagaatagttacaatatgtgaatcgactttaggatttagacatggtccaaaatcaataattaacgatgatactttagttatacttatgacttctagtaatgaatacactaaattatatgatttagatttagtaaaagaaatttatggtgattcaggagatcataaactagcagtaatcagttatgaagaagaacaacaattaaaagataactgcaataattatttatgtgtaaatggtaaaaatatacctgatgcatataaagtatttaactacatgttatttggacaaatgtttggatatttagattcattaaatcttaatatttcaccagacaatccaagaccagacggtactgtaaacagagtagttaaaggtgttgtaattcacgaatataaatagataggatggggttgaactaatgataggaataatattatcaggccatggaaattttgcttctggtttactaagcaatttaaaattaatagctggagaacaggagatggtaattggaattgattttacagatggacaaggatcggctgaactaaaaaataatctaaaagaagctatgaatgaattaggagatgaaattttagttttaacagatttggctggtggttcaccacatatgaattctgtattattaaagcaggaattaagtgataaaaaaatagaagttatttctggtaccaatataccaatgttattggaagtagtacttggaagagataatattaatcttaaaactttggtagaaaaagcaaaaaatgctggagttaaaggaatagaggtatttgaacttaaagtaaaacaaaacgaagaagttagttttgaagatggaatatagagtatgaaaattttaagttcaagtaagaagggagtaattcacaatgatattatcaacaagagaaatgcttttaaaagcgcaacgtgaaggatatgcggttcctgcattcaacatacacaatatggagactttacaagtagttgttgaaacagctatggaaatgaaatcacctgtaattgtagcaggcacaccatcaactatacaaaattatgcaggttcagattatattaaggctatggcagaagttgccgcaaataagtatgatgttccaatagctatacatttagatcattatgaagatgtgaatgagataaaaagaaatattgatattggatataaatcatgtatgatagacgcatcaaaacatgaattcgaagaaaatataaaaattgttaaagaagtcgtggaatatgctcacagatatgatgctgtggtagaagcagaactagggaaacttggtggaaaagaagatgatttaataattgatgaaaaagatgcactatatactaatcctgatgatgcagcagaatttgtaagaagaacaaatgttgattcactagcaatagctattggaactgctcatggtctatataagggagaaccaaagcttgattttgaaagattagaggaaataagaaataaagttagtgtaccattagttttacatggagcatctgatgtaccggatgaattagttaaaaaagctatttcacttggtatatgcaaagtaaatgttgcaactgatttgaaaattccttttgctaatgcattaagaagattttttgatgaaaattcaatagaaagcgatccaagaaaatatatgactccaggaaaagaagctatgaaggagatcgtaaagcataaaatcgaggtttgtggaggtgcaaatagatattaaaataaaaaaagcttaggaaaaaattaaaatcccaagctaagtaaatattacttattgcagtaagtaataaaataaatgatcaaatatattttatattaaataacaaataaatacaatagacataaagagtcttaaagaactagaaatatcttttataaaaatataaatatgaattttaaggcacagtcatttttgaactgtgccttaaaactaggcaagctaagaatttataataaataaatttaatagcaaaaaggtattatgaattaagtcgatgaaagaaggaacgaatatgagtagacatccaataattgatataataaaaaattataaatcagggaaacatgatggaatattttcagtatgttgttcaaataaatttgttattgaagcagcaatggataagctaaaaaatacagatatgtatctgcttgtagaagctacagctaaccaagtggatcaatttggcggatatacaggaatgactcctaaggaatatagagattttatttatgaattatgtgataagaataattttcctaaagagaaagtaatattaggtggggatcatttagggccacttacttggagaaatatagatccaatacaagctttagaaaattcaaaggaattaattagacaatatgttatggctggatttacaaagattcatattgatacaagcatgcagattaaaggtgatgcagaagatgaaaaatttggtgatgaaattatagcagaaagagcagctatattgtgtaaaactgctgaagaagcttacttagaattacttgagtctgataaagatgcaatacatccagtttatatagtaggaagtgaagtacctatacctggaggggcagaagctacggaagaggaagaaggactgcaaataacaaaagtagaaaattttgaaaatacagttaggacatttaaagaagcatttgaaagacatggaatttccaaagcattcgaagatgttattggagttgtggttcagccaggggtagaatttggttctacaagtgtatgggaatatgatagagagaaagcaagcagcatttcaaatatcataaagaaatataataatttagtgtttgaggcacattctacagattaccaaacaaaagaagccttaagatcaatggtggaagatggattcattatattaaaggtagggcctgctcttacatttggatttagagaaggcgcgtttgcattaaatgatatagaaaatgaacttttaagatataattctgattttgaagtatcaagatttagggaaatattagatttcgttatggtaaagaatccaagtcaatgggaaaaacattataatggctcaggggaagaaataaaattagaaagaaaatatagcatgtctgatagatgcagatattacatgcctaatgaagaagtagaattcgcattaaataaaatgatggataatttatccaatatagatataccattaacattaataagccaatatatgcattcacaatatataaaaatacgtgaaggaaagttaaagcaaaatgcatatgatttgttaaaagacagaattggggaatatatagacgactatatttatgccataagaaaataataataatccccttaaatcgcctgtttaatcaaatgattaagtgggcgatgaatctatgtaatgtagctgattacgtaaatatcatgaaagtagtatattaaagttagaaatgggggaatgagaaatgaagcaaagggaaagaatgctagcaggattaccatataaaggctcattagatggactacgtgaagagagaatggaaactaagctaaaaatatatgattataatttgcttcgtccaaatgaaacagaaaaaatggatgaattaattagagatatactgggaaaaactgatgaaaagattactgtaaaacaaccatttcattgtgattatgggaaaaatattcaggttggcaataatttttttgctaattataattgtacaatactagatactggaagagtaataattggagaaaacgttaaagtcgcacctaatgtatcaatttatacagcaggtcatcccattcatccattgtcaagaaattcaggatatgaatatggcattgaagtaataataggagataatgtgtggcttggaggcagtgttgttataaacccaggcgttaaaataggtaataatgtggttattggatcaggaagtgttgttactaaagatattcctgataatgtaatagcagcagggaacccatgcaaggtaatacgagaaataactgaagaagatagaaaatactattataaagataaagaatttgatgtgcaagattattaattttaaattgctgcccaattagtcattaagtttatggcattagggtatattgataaggagggattaatttatatgaatacaacaaaattaggaattaaatttttagagactaataattatgaagaattaagcagaaaatgtgctgaggttatgattgagtgtttaaaaaataaacccaatgcactattttgtatagcaacaggagagtcgcctaatctgtgttatgaaatttttgtacaaagagttaaggaagaaaaaatagatgtaagtaaattaagactaataaaattagatgaatggtttggaataagaatggatgatccagcaacatgtgaaacgttcattaaaagaaaactattggagccgctaaatatacctatggaaaattattatggttttaatagtaatgctgataaagaggaagaagaatgtaagagaatttctgataaattaaaagaagaaggtcctattgatttatgcatattaggtcttggcaaaaatggacatcttggattaaatgagcctggatcctacttaataccacattctcatacaactgaaattgatagtaaaactaaaacgcattctatgttgaataaaactaatgttaatgtaagcaagggaataacattaggtattgtagatataatatcgtcgaaacagatattatttattgtgtcaggagaagagaaaaaagaagtctttaatgaatttttagaagtaaaaataaaaacaagcttgccagcatctttattatggttacattataataccttatgcatatttgagaaatctatgatattttaattagaatttaactaaaagtataacatttatcaaatatttaattaacgtgagttcgatggaaaaatttaagggataaaaaatcccatcaaaatgttttattatataagtgcgaccaaataaataaaacaaaggatgggattttatgcaaaacttattagtagaaatattttatgatgtagacaatttttgtattggatttgaaaattactgtaaaagtcatttcctaacggaaaatagcgaccgcaaatttgcaatgattaaaagtaaaactttatcattaagcgaagttatgacaataactatctactttcatttgtcaaattacagaacttttaaatcatattatattgagcatgtgtctactgttctcaaaccgtattttcctaagcttgtgagctacaataggtttgttgaattaatgcaacaatcattagttgcactactattatacatgatgaaatttagaactggcaagtgcacaggaatttcttttatcgattctacaactttgaatgtatgccataatagaagaatacactctcataaggtttttaaaggaattgcagaacgtggtaaaagttcaacgggctggttttatggttttaagcttcatcttgttgttaacgataaaggggatattctctctttttatctaactccgggaaatgtagatgatagagaaattaagactatagaaatattagcaaaagatttatttggaaaactttttggtgacaaaggttatttatctaaaaagatctccgatattttgtattccaaaggtattcagcttataacaaagataaagaaaaacatgaaaaataaattaatgttaatggaggataaaattcttcttaggaaaagagctatcattgaaacaataaatgaccaactaaaaaatatatgtcagatagagcataatcgacatagaagttttactaattttgcggttaatatagtttcaggattgatttcgtatagttttcttcctaagaaaccttctcttaagttggacaaatatctaactatggaataattggaatatcgaaccacaagattacaaggatacttttttgctttttttcataaccatatttacccataaaatattctagcttttcgaactcacgttaattaactaagtatatgaaatatatatttaatttaaaaaataatataacaataatccttaaaacctaaaatgttctaactgaagcctagtgctacccgcactaggcttttcttacttatgcattcctaatatgtacacgtgataattggtaaaaattccgtaagaatagtgcaaaccattagattaagacaagtatgttagcgtggctggaatcagaatggaagtcggtgacaaagtttcggtttgagtttacggatcatatttattatttgcttttttggtttgagaagatctatggaattatatagattcaattacagaattcgcttttatccttggagatttccgaagaagagaagtgcaatattatgaattaaagatgtcagaagaaaggtggaagaatatttaggaaatagataaagtggatgaaggtattcacaggttgtcttttaatgatggtaatgaaggaagagttttaagcgatggttgtagcatagtttctgattggactttttgatcaaagataaaaaatttaaactactatgttataatatattttatgtaaaaatagcattattagaatgcaatgattagatgtaaaagtgatatttcatttatgatttatagattaaataaatggctaaaattttatttgtgcttgtcatgaaagaggtgattacttgaaactagaagaattgaaatcaatattatttaaatcagcttcatctattatgaaaagagagggagaggttaaatttaataatggtttagtcacttattttaaggggaaaaagatagataatatatatcatatttatggaagagttacggataaaaataaaattaacgaatttagtacacatattaagatcaaccttcaaaagaaaaaactagagagcgctaagtgttcctgtgacgagtttaaagagtttacttcaagtggatatacattaatgtgtagtcatataactgctactgaatataagtttattagcttgcttgaaagtgataatgataaagaagaaagcgctgaaaagaaaactgcagaaaaatataaaatatgggcaaataatcatagcacaaggcttattcgaaaaatagaaaaagattctctatattatgagttgcaaacaccttcaagaggtggaaagcttatactaaagcaagaggaacttagaaaatttttaaagggtatagaggatagaaaaataaaatttaagtttgattatattgaaattacagcaccaatattgcataaagatctacctataacctttaatgttaaagaagataacggaatgatagtcttgactactcataagcagtttcctatttcactaaattcagacaatgatgtttattattttaggaatgaactctatttaccttcaagaaatcaaattgataattacattagcctgcatgaaaaattattggctcatggtagaattacctatagaaaagatatagatacttatactaaactaatgtccattttaagtagaatttcgagtaacataaatattgcggaaaacttaagaaattatgcatctaatttatcaagacctgaattttttctatatgaaggggacggaaagatttattgtgatatatttcttagttatggcaatacaaagatcaatatactagatgagaaaaatgtttcgcatacattcataagagattataaaaaagaagaaaagcttcttatggaagttgaaaagctaagttttgtaaaaatggataacagacttgtatttataggtaaagatgaggagttgtttaatatattgagcgaaaaaggagagacaattcactcgttgggaaatgttatgttaggaaatgaacttagcaataaaaaaatatataattcggattcaattagagttgatttagatgaagtggatggaagttataatttctcttatagtataggggagttaggaataaaagaattaaatagtgcattagaagcatataaaggtaaaaataaattttacaaaacaagaaacaatgattttttagattttgaagataatggtgtgagaaatttttttaatcttatggaagcattgaatataaatgtagattcaaataatgaaaaagttaaaatggaaaagaataaagccttatgtctatatgaaaatataaagaatataggtttaggaattatagagaattccagtgaattagaagaggttgggaataagctagccagtataaagaataaaaatatacctatacccagtgattttaagggaattctcagagaatatcaaattaatggatttaagtggctcaagaccttaagtgaagtaggatttggaggaatattagcagatgagatgggattaggtaagacaatacaagttatagcattcttattatcagagaagaataaaaagacttgcatagtttgtccgacatcattgctttataactggaaagatgaaattttaagatttgcgccaagtttaagggttgtgatgattcatggaactcagagagataaattgattgaagatatatgtgaatatgatgtagtgctaactacctatggaacattgagattagatatagataattatagagatattgtttttgattattgcataattgatgaggggcagagtattaagaattcggaagctcagaattcaataactgtaaaagaaattcaggcaaaaattagatttgctttaactggaacacctattgaaaataatttaacagagctttggtctatatttgactttataatgccagggtacctctacactaaagaaaagtttgaggaaaaatttatttcaagaagcgaagataatttagagaatcttaagactatgataaagccttttattttaaggagaactaagaaagaagtaatgaatgaattaccagataaaatagaaaaaactttattagttgaaatgacaccttctcaaaaagctgtgtatagtaattatgtaaaaagagtaaaagctgcaatgaagaataacaaagatggtagaatcgagatattctcatacttaactaagctaagggagatatgtttagatccttcacttatacttgaagactataatggaggaagtgggaaaatagaaaaagtagtagaaatcattaagaatcatattgattctggtggtaagatacttctattttcacaatttacttctgcattagataggattggagatcgcttaaataaggagaaagtagaatttttccatttgagtggaaaaacaagccctaaaaatagaataaaaatggttaaagattttaatactaatgagtttgtgaatgtctttttgatttccttaaaggctggaggaactggacttaacttaacatcagctaatttagttattcattttgatccatggtggaatccagcagttgaggctcaggcgacggatagagctcatagaattggtcaaagagatgtagtagaggtgattaagctagtatctaaaggaactatagaggaaaaaatcattttgcttcaagaagataaaaaacaacttattgacagtattttaacgggagaacttaaaaatagcggtttattaggcagtttatcaaaggaagatttgcaacaattgtttgagagagattaaataattgttgtataaatataaaaagatattagtaagaaataattatgttgaatgaagaaaagctggctagatttttaatgttaattgaaatctgtaaaaattatatatttctatgagtataaaattatctgaaaaatattttcagataattttattatttaaaggaatatttgaaaataagtacctgttttgagtgcatgtatataattatcaatagttatctactataatgtaaatgaacaaaatgtaaataccaagtacgaagcataagcgtttaaagattaggtcattcttctacttgtcgatgatctaacttgttaaattcgtttaagcgatactccatatttttttcataatctttgttaaagatacaagagaatatgacatctaaaacatattgcgtagcaatatgagaagaatagtgagaaattttcttttttaaattttctttactagaaacaaatatatgatatttaaataacttagttaaatagttttcttgagctgaacagataactaaggtttctatttccttacgttttagaactaaagcaatttctttaatttcaggtgtcttaccagaataagaaaggataattgcaacttgcttatttttattattggaagcggcagcacggtatacttggttcattggaattagtgaaacattaacgtatctaccgatgctttgcattttatcttgaaagttcaatgccgtttgtatattatttgtaacggcataaacatcgactatctcggcattataaattaaatcaacagcatcttctagctgttcggaattaaagaaggaaaaagtgttggttaaggtatcaatataaagttgcttaatgttacttgcaatttgaaattgtgtatcgtctttcttgaaaggaaaatttatatcaatattttctggtttattcattttggagtatagttcttcaacaaacttgattttaaattctttgaagccagttaatccgatttttttacatagtctgtgtatagttgagattgatgaaaaagatactttggctaattcatctagtgacataccagcaacttgctcttgattttccaatatgtaatttgcaagtaatttttctgtttcagttaaattattcgcatataaaagtaaattataaattgtcatgataattatctccttggtgaagtttacatttttagatgaattattttattaatgaatgtcgtcaataaataattaaatttgtcattaatactttttaaggaaaagtactatatatgttgctaaaataattcttcatcataattctaaaaatatttgaagaattttagccgtaattatgaaatatgaattgtgaattgcaacatatatatttattttagcattaataaaaattattatcattaaattaaactgatgaattataaacttaaaatatcaatggagttagcatataaattatattgtagaaattataataggatttgagtagctattataaagatgatttttaaagagtacaagcagtttattttttataaagaaaataattaagtagagtatatattcacagcacaagattcatacattgtttcattctttggagagttacaataaaatcaaatctgcaagtgactttagaaagtagtagaaatacacagtcctagaaacagatttcgttttaaatattttagaaaagtatataaaaatgagcaatataggaggaggcaaaattatggcatataaactaatagcttgtgatatggatgagacattattaaatgataatcatataatttgtcaaagaaatattgatttaataaaaagagccaagaaagagtatggagtaaaatttgtaccagctacaggaagaggttattcttctattcagaaggacttgaaaattttagacttatatgatcaggctggtgaatatattatttcctttaatggaggcgctttaacagaaaataaggataacaggctactgcaatttaaaggattaagattcgataagatgaaagaaatttttgaatatggattaaataaggatgtttgtatacatgtttatacaaaagataaattgtatatttataatttatcacaaagtgaaaaagaaagaattaaaaatcaaaaattagagtgtactattatgaaagaaaacacagtggattttcttgaaaaggaaccaattgcaaagattatatatcaaaatatagatgttcaatatcttatgggtattgagccagatatgagaagtattacagaggggtattgtgctgtaagttattcgtcaaatcgatatatggaatttaattcattaggggtagataaaggaagtggcctaattaacctggcaaaaattttggatatagatattaaacaaacaattgctgtaggagataactacaacgatatgtctatgttaaaagtagcaggtctatcagtagctgcgggaaatgcagttgaagatgtaaaaagagcttgtgattatacaacagaagcagataataatgaaggtgttgttgctgaattaattgagaagtttatatttaagaaatagtaataatagttgtaataatattttgttgttaggcacatggaaatagataacgagtccaaagttgctatggatattttccataaggcaaggagacggattgccctcatagcgggcctattaggtcaatttgtcgacgtgggatgatgagaaataggctggtaaatggacttgttatttatttgattgtgccttatatagaggaggaaatttaattatgttagctgattatcatatgcatacaagttttagtgatgattccacttatcctatggaagatgagatcaaaaaagcgatatctttaggaattgatgaaatatgctttacagagcatgttgattatggagtgaaagtagatataaattgcgattatatagcgtatataaatgaatttaatagatgcagagagaaatataaagataaaattactatgaaacttggaatcgaatttgggatgcaagaacatactattgatgaattccaaaaggattttaatgaatatggctttgattttgttatactctcttgtcatcaggtagataataaggcattttggacacaggattttcaaaaaggaaagacacaaaaggaatataatgagaaatattatgaggaaatattaaaagtaataaagaaatatgatgactatagtgttttaggacatttagatatgattaatagatatgataagatgggaaaatatcctttcgaaaaggtaagcgatattgtaaaagaaatcttagctcacgtaatttctaatggaaaaggaattgaaattaatacatcttgttttagatatgggttagatgatttgacaccttctagagaaatattaaagttatacagagaattaggaggaactattattacaatagggtctgattcgcataaggaagatgatgtaggatgcaagatttcttatgtaaaaaatgaacttaaggaactgggatataaagaattttgtacatataagaaaatggaaccaatctttcattgcttatgataataaatgaacaattaaagatattagtaaagttcagcgtacacggactataggtaaataagttcatgtatgctgtatttttacttagttcaatttattattatttaattaccagtaattgaaaactgttttatcgctatgaaaattaataaaatggagttattaaaaaaataattttacatattgcacataggtgttaaaatataggaagattagtttattttgaaagggatatgaaaaatgataagagaagcaacggaaaaggatttagcagatattttagagatttataatgatgctatattaaatacaacagcgatttatgattatactgctcataatcttgaggaaagaaaacagtggtttgatgaaaagaaaaaagatggatgcccactattggtgtttgaaaaagatgacaaagttgtaggatttgctacatacggatcgtttagaacttatccagcctttaagtacacaatagaacattctgtatatgttcataaagactgtagaaatttaggaattggaaaaatattgttaaaggaattaattgattctgctaatagagatgagtacgcaactatggttgcttgtattgatagtttaaatgaaggtagtatcaaaattcatgagaaattcgggtttaaatactctggcacagtaactaaagcaggttataaatttggtaaatggttggacttagttttttatcaactagatttaacaggtcctaagaatccaatagaaaagtaaggatttttatattcttgaaataaatatatgtattttaagaataacaaagcaccaccagatgtcataatttataacatctagtggtgctttttcacttttctattctgctgaatccatttcactacgcactgaagtattaaatatcaatgaagtaagcattgcacctattagaaaaagtatgcctgctgagatgtagagaatagtaagggaaaattggcttttaagccagcctgtaattgacattgtaataaccatgaatcccataaacattggatttaatactccgtttacccttccaacaaactcagatttcgttaattgaagaattagtgtgttaataccaatttgaatacaaggcataaaaaatccgttaaggaattggaacaatagaattataatccagcttgaagataatcccatgccaaccattgaaatggtgttaactataagtcctattgcaagaagcttttgaggcataactttctttgatattgtcataactaatccgccaccaataaacattgctgccccatttaccataagtaataattgaagattttctttaggaagaccgagtctttcaacaattaagaaaaccccaagtggttgtatgataccaacagcaaggcctgataccgcaaaaacagatccaagtatagttagctctctttgctgccaaacatggacgaaaccttcttttaattcttctaagaaatgatttctagtttcattcttctcaattatttcatcagcgggtaataaggttaatactgaagctgatagtaagaaagctacacccattatagatatagagatatctattccaaacttttgaaaaacaatagtacctaatgctggtcctataatcataaaaatagacataagagtttggaaaatagccattccagtttgcataaactcttcaggaacatggactttaaataatttcattgcagaaggctgagaaaactgagacaaaatagatgaaataaatgttacaaaaaatacagcttcccaagttgcaaagattattgtaagcagaacggcaaaaacagaaatagcacttagtaaatcacaccaaaccatagtacgcttcggtcgccatctatctgcaaaggttcccccaataaatgaaaatataaatattggagcaaattctgcaactgaaattaaagaaactgcaatgggattgttattagtcttctccattacaaataataatatggcgaaattacgaacccatattcctatttgtagaaaaatagaagaagctataattactcgaacaaatctattgcgaaaaaatgaagacattgacattgtcgattttgtcatataattacccctcttaaattattgaatattttattatatactatatcataaatcagtagcacatcaagttaaaatattattataatgttgtataagtagctaagtatatatataattataaagttgaccttaaaataaacaaaggaaatttataaggaagtgatttaaagatgaattcaagaaaaagaagcattgcagcagcattaatggtggcaatgtttttaggagcggtcgaaggaactgttgtaacgacagctataccaacaatagtgaaggatttacaaggatttgaaattattagttcagttttttcagtatatttactaacttctgctattactactcctatatatgggaaactatcagatctatatggaagaaaaaatatgctttcaattggaataataatatttttaattggaagctttttatgtggattatcgcaaactatgtacatgctgataggagctagagctatacaaggaataggtgctggagcaatatttacagttacatatacaattattggagatgtatttacattagaggaaagaccaaagatccaaggaataataagttctgtttggggaattgcaagtttagtagggccatttttgggaggaattttaatagatttattatcttggcattggatattttttataaaccttccctttggaataatatcagttgtacttattcaaagaaatttagatgaggtattcgaaaagaaaaaacatagcatagattttgcaggaattataactttatcactggcgatggttatatttttaaatattttcttatcaaatgaagatatgagttccagcaataacctatttattttattatccgtcattgcaacggttatattactggttgcattttgtataattgaaagaaaagcaaaagagccaattattccttttgatatatttacaaagacaagttcaattgtgaatttaataagcttcttggcttcagctatattaatgggttcggatgtttatctcccaatatacatacaaaatgtacttggatatagtgctaagatatcaggcttgtcactagctcccatgtcatttgcttggcttatagctgcagtaattttaggaaagtgtatagtaaagtttggtgggaaaatagtagtacttatatctaatattatcttactaattagtacagcgttattgcctacattgaatgcagaatcttctatattattagtaataatatatgcgttcataatgggatttggatttggtggagcctttacaactttaacaataataattcaagagtcagtagaatataacaagagaggtgctgcgactgcagctaattcattgcttaaaacaataggtcaaactataggagtaagcatatttggtagtatatttaatatatatataattaagtattttactcaattgggaataaatggagttgatccaagtaatttgtataattcagcggtaactgatcagcagataagactctcattaaacagttcgttacattttttatttataatacttataggaatagccgttatatcgttactttcatcaatgataatgcctaaaataatggaaagttctaagacagaggagaacagagcataaaatagaggttgaaaatttatgaactaccgtgactgtatcatatttaagtttttaaattattatgatatagtcactttttattatataagagtttgcattggagtgaaataggtggaatctagcccaccctgaagcataaattattaataaagctaatttagaggggtacattttaaaagagaacaaaaaggaaaatatattcatcgcctagatatctcttagttgaatttgaaaatgcagataaaaaagtctcaggatacggaatctcctgagacttttagcgatagaaaattttaaaattttctgttataaaaatttaaatgatttgtagaagcgaggtctaatgagcgaatacagtttgtttcgcttttgatacaactgcgcttaatggcaatgcaattactatgccggtagatacttggattatgttccctaatatatctttagctgaatatgctattccttgtattagtccaattttttctgttaaaaaacctgatattattattccagcaaaaaaatatgcaatcaccataaatataccactggatacaaatgcaattgtataccttacagtaactttgttttctgacattttttccaatatgaatcctgcaatataagccattccccatttaataactagcgtaaagggtgcccaaaaataatatccacctaatgcgtcaacaagaaacataccaagagcacttgaaattgctccttttttcttacctagaactattacagataagaataccatgcagtcgcctatttggacgaagcctccaactgatggaattttaattatgcttcctgctatataggttaaagcaatcattagccccattaatactagttcgctagtatttaaagatttacttctttccataaatattacctacctttttataaattaattactgtatataaatacaggtttttatagtctttgtttttatatctagcatgctttatacaataaaactcaatacaaataataaaattattatattaatatatcagaaatttatcaaatgtatgggtacacatggaaatgattagaataattcaatctggacatatatatccacaaaatagtattggaaaaaatctatttaagtaggctataatgtaaatataaattggtcctagcggggaggagatataatttgagaatattgcatacagctgattggcatttaggcaagaatttagaaggacaaagccgaatggatgagcaagaagagtttttaaatgattttgttaagattgtagaagataataatatagatttaataatgattgcgggagacgtttatgataatccaaaccctccggcaagggcagaaaaaatgttttatgatactttaaagagactatcgaaaaatggggagagacttactttggttatatcaggaaatcatgataatccagagagattggttgcggcaggtccacttgctcgtgatcatggaattattatggttgggacaccaaaaactatagttccttgtggtgagtatgggaaacataaagttttgtcatcaggagaagggtatgtggaagttgaaattaataatgaaaaagcagttattttaactgtgccttatccaagtgagaaaagattgaatgaagttatttataactatatggaagatgaagaggaaaaagctaaatcctatagtgataagatattttctttattcaattcgttaaaaagtcattttagagaagatacaattaatcttataatatcgcatctatttgcaatgggaagtgaggaaggtggttctgaaagaagcatccaattaggaggtgcttatatagtagatggaagttgttttcctaaggaagcacagtatatagcattagggcatgtgcataaaccacaaatagttccaggaacggataaaagagcaaggtattgtgggtcaccaattcactataacaaaaaagagattagctttgaaaagagatgttatatagtcgatgcaaaagctaatgaagaatgtgacatacaagaaataaacttaagggtatataaaccaatagaaatttggaaatgctcaagtattgaagatgcaatattacgatgtgctgaaaataaagataaagattgctgggtgtatttagaaataagtacagatagatacataagagaagatgaaataaagcaaatgaaagaatttaaagcagatatattagagataatgcctaaggttaaaggattggaagaagagcgtgaattaaacttaagtgaaaaatcatttgaggaaatatttaaggagttttatcttaaagaaagggggactcccccagaagatgaagttatggaagtgcttttatcaattataaacgaagagggtgaaacagatgagaccaattaaattgaggattaagggcttaaatagcttcatggatgaacaaattatagattttgataaattaacagatagaggattttttggaatttttggacctactggaagtgggaaatcaactatattagatggaataactttagcattatatggaaatgtatcaagaaaaagctccaattttataaatactaattgtgacagattaaatgtaaattttgagtttcaaatatcaggtagcgaaataagaaaatatatcgttgatagggagtttaaaagaaaaaaagatggaggaataagctctggaaagtgtaaaatcgttgaagtaacaagttcagaagaagaaattttagcagatggagttaaaactataaataagaaagttgaggagatagtaggtcttaatttagaagatttctcaagaactgttgttttacctcagggtaagtttagtgaattcttaaagcttgaaggcaaagataggcgtgatatgcttgaaaggttgtttaaccttcaacaatttggagacaatttatccagaaaacttagtgcaaagataagcaaagagcgaactgatagcaatattttggctggacaattaagtggatacaacgatgtaagtccagaaaaattaaaagaaaaggaagattcttttaatgaattaaaaaataagctggaagctttgaaaaaggaattagatataatagaaaagaagcataaagaaaatgaagaaatatggaagctacagcttgatttattagagtataaaaataaagaacaaaaattaaaggaaaaagaggaaaagataaattcatatctagaaaagataaagctaggtgaagcaggctcaaaggtgctaccttatttaaatgcatttgaaagcactagaaaagcctttgataaaaatgagattgagttagaagaattaaaattaaagatagataatataaaagaagaaaaagaaaaaatcgagcaactttggtgtatggcaaaagataaaaaagagaataaacttcctcaattaatgatgcaggaacaaaaagttaaagatgctattgaagaaaagaatttgatacgtgagatagaaaataaaatagatttattaaaggcacaaattaaaaaatgtgatgctaaaaataatagtatacagagtgagctcattaaaatagaagaagaaataagtaataaaaataaattaataaaagaagacgaaaaaacatatgataatttgaaaattgaagaaagcttaaaagaggcagttcaagaaggaataattgtagaagaaaagttagaaaaaataaatggaattctagttaaggataagcaaaagaaagcagctattgaaaaagaaaatagtgaaactatacttaaaggaaaagctttaagagaagttttagataaagaaaaaaagagtttagaagataaagagaaacaatatgagtttttacttaaaaattcgccaggtgaacaaaaagatttggttaatttaaaacagttgatagtggaaaatgagcaaaaatggagtagttatgtaaagctgaacaaagaaatagatttctctagagaagagataaaaaacttacaaatagatatattaagtagaagagaagcagaaaagcaacttgaaaaagaactagaggaaataaagaatactcaaaaagagattatgagagaaaacttagcacatactcttagacaggaacttaaagatggagatacatgtcctgtatgtggttcaactcatcatatgaaagaaaatattaggatctttgaagttcaagatgtggagaatatagaggaaaaaataaaactaaaagaaaattcaataaagattattagtagtaaaataactcaaggtgaaactaagataaatagttttaacgaaaaaattaaagttaatcttgaagaaattgaaaagctcggaactgcgtttaaggaaaaacctttggaagagttaaagcagggatttatagatttagaaaaagctttagaaagttattttaaagataaagaagaacttgaaaaaagtgttaataagctaaggaatgaaattaatattaaaactggagaaataaatgaattacgagcagtagttagaactaaccaaagacagcttgaagatttggaaaagagtattacagaaaatacagaagaattgaatattctaaggaatagattggattcgctaagagcaaagacattagtaagtgattttaataaaaaaagcgaagaaattaaagccgttgaaaaagagcgggaaagattatcaaaggttattaaagctaatagggagctaatagaaaagttagaaaagaataaagaaaatttaagtaatgaagtactattagtaaaagaaaacttaactaagcataatacagaattaagtagttacgaaaaaagtaaagaagaaaaaatacaagcgataaagaataaggttgataatgcagatgatctggtttcactattacataaaattcaggagaatattgaaaatattaatagtgagtttaaggaaagcgaaaacaataaaaataaaatagagaaagaatttaatgaaaacaatgagagattaatttctgtaatcagtaaatataaagaattaagtaaacgaaaaaaagatgaagaagctcagttagaagttgcaatagacagtgaaggttttaattcacttgatgatgtcaaaaaaaatataattggaaaagaagaaattaatgattataaattaaaagtagaaagttataaaagtgaagtatcaaaagtaaatggggcaattgaaagtttacttaataaaatagatggtaaagagttaagtgaagaagaatatacagaaataaaactcttaaaagatattaaagaaaaagagttcaatgaaattaatgaagagaaaattaagttagatgaagaattaaaaaacataaaaaataagctggaagaacagaaagacctcttagataaaaagatgaaactagaacataaattggctcttcttggtgatttagaaaagttatttaagggaaagaaatttgttgagtttgtagcagcaagtaagcttaagtatgtttcagttgaagcatctaagagattaaaagagataactcatggaaattatggactagaggttgatgacaatagcagatttataattagagattataaaaatggtggagccaagagagattctactactttatcaggaggagaaacatttttagcatctttatcattagctttggcattatcagcacagattcagcttaaggggacagcaccattagaattatttttccttgatgaaggatttggtaccttagatgacgatctgcttgaagttgtcatgaattcattagaaaggattcataatgaaaaattaaaggtcggcataataagtcacgttgaagcaataaagaatagagtaccagtgaaacttatgattactcctgcagaatcaggtatgggcggaagtaaagttagaattgagagaaactaaatttataaaaataacaagttattatattaatatatagcttgttattttttgtgtaagttggtaattaagtgctataatatacattgtaattagattactaaaataaaaattcaataaatattagaggcgattttaaatgtttaattgtaagtctaacttgattttatcttttcataattcttcagataaaattaatattagaaaaactattagaccttgtaaatgcaataggcctatttattttattccaacgtgaatatgtactcttaaaatatgaattaaataattataagaaaatgaaaattaatttttaggaggtacttgtaatggaggaattaaatttaactaaaagaataaaaacagctagccatagtgctagaaaggtaagaagagaaggtaagattccaggagtaatttatggaaaagaaatgggaaatgaaatatttactgtagatgaatcagcattactaaaagaaatctcagctagtggagagcatggaatagtaaaatttaatcttgatggaaagaagggaaatgctgtaattaaggaaattcaaagaaatgctttggggaatgaagcaattcatgttgattttgaagaagtagcagcaaatgataccatgcatactgaagtcttaattaagattattggtaaaggtatcttagaaagcaaaggattaatattacaaactcaaagagatttagtaaaggtatcttgtaaagcaaaagatttaccaaaggatgttgaattagatgtttctaatggacaagctgggacagtttatacttttaaagatctaaaatttgctgaaggaattgaagttttagatgatttatcaactgttataggatcaataagtgaagaagaaaaagccaaggaagaagaaacagaatagaatcatagataaacagagttgaatttaaaatatcaaaatcaaccattttaatatggtatatatagataaataatttgaaatatagattcatgcaatattataaaaaaagcagaaacgttattatttcgcaagactatgaaaatttcgttgaaagtactaaattgtaggttgcattactaatgcttgttcccaatttcgttgtgacaagcattagtcgaacaacctacaattaagcacttttaacaactcgttttcaaatgcttgctgcataaaaatgttcctgctttttattttggtgtttattgtaagatgcgaatcggatctttaaattatttatctatatagtaaatttatgattattatgaaaagtgaccttgtttcaaagatatattttaggataattttaattattgcagttaatattatagattagaagggtaaaatgcttggcaataaatccaagtttttatatatgatgcaaaatatataaaagtgtttttatattatggataaatattgtataatgtataggagaaaaaacacagagaggggatcagaaaatgaattataaggaaaagtataacgtgtggattaactctgactttattaatgaggaaactaagaatgaattaaagagcatatctgacgaaaaggagattgaagatagattttaccaagatttagattttgggactggtggattaagaggggtaataggtgcaggaagcaatagaatgaatatatatactgttgctcaagctactcaaggatttgctaattacttgaatgataattttaaagatccttcagttgcaatcgcatatgattcaagaaatatgtctaaggaatttgcaaaagcagctgcacttaacttatgtgcaaataatataaaagtatatttatatgaaagtttaagaccaactcctgtattgtcttttacagttagagaattaaaatgtagtggtggtatagtaattactgcatctcacaatccaaagatttacaatgggtataaagtttatgatgaattcggcggccaagtaacagacgaaaaagcaaaaatgataattaattctgttaaagcggtagatgatttctcaaaaattaagagtatggatgaaaatgttgccttagagaaagggttattaaaatatatcggagaagatgtagataaggtttactatgaaaaagttaaagggttaactataagaacagatttagttaaggaaaaagctagtaatttaaatgtaatatatactcctattcatggttctggtaatgttccagtaagaactgtattaaaagaattaggctatagcaatgttaaagttgttaaagaacaagaagctccagatggaaatttcccaacagcatcatatcctaatccagaaaatcctgatgtatttgaattagcattaaagatggcgaaaacagaaaatccagatataatttttggaactgatcctgattgcgatagaataggtcttgtagttaaagatagcactggagaatacaaggtattaactggtaaccaaacaggattactattaactaattatatattaagttcaatgaaagaaactaataaattgccacaaaatggtgttgtaattaaaacaatagtaacaacagaaggtgctagaagtattgctgaagattttgatattgaaattatggatgtattaacaggatttaagtacattggagaaaaaataagagaatttgaagatgcaggagatagagactatatcttcggatttgaagaaagctatggatatcttgctggaaactttgtacgtgataaagatgctgttattgcagcaatgttagtatgtgaaatgtgcctatactataaagaacaaggaaagagtctttacgatgcattaatagatttatatgaaaagtatggatattttaaagaaactcttgtatcattagaattaaaaggaaaagaaggtcaagaaaagatagcaaactgcattgaagcattaagaaataatccagtaagtgaagttaatggtgtgaaaatcattacaagattagattacaaattaagtgttgaggaaaacaccgtaaataacactaaggcccctattgacttacctaagtcaaatgtattaaagtacatcttagaagatggttcatattttgtagtaagaccatcaggaacggagccaaagatgaaagtttatttagcagttaagagcaacagcttagataatgctgagaaagatattgctacatttaaagaaaaagtaatggaaataattaattcacaattaagctaagtttccataagtagagagccaaaatctatgattttgtgtgaatcagttaagcagacatccaaatctgtgatttgatgatgatcgcttactatgtgagtactcagcgaacgaatgtgagtcgagtttccttaagtagagaaccaaaatctgagattttgtgtgaatcacttactcagcgaacgaatgtgagtcgagtttccttataaattgctatcatcttttggtgatagcaatttctttaattatgaaaccaaaaagtgaatgtctccaaattattattaatgaatacttaaacaattgattaaaattagtgtatactgcacaattaagaaataaatgcctttaagaaatttatagaattgtattattacaaatttcctgggaaatctgctcaataattgtgcattctcaattttgaaattatagattgattaagtattgataatgataattaaatatttgacttattagataaacatatttactagatctttaacatataacttagacttattggatgaacatatttactaagttgctaaaactttaagttcgtatcttcactggaaatcataaatacattttcatagctttttggaatcaaaatatttatgatttaggtaagttaccatataaatttagttctagagttggatatctataaagcgagatttaaacaagaggtgtaaaatgagtaattacaagacaatgtataaagataaattaagtaaattattatttttagaaatgaataaagaagggttcaaaagaagcattaatataccagaaggcgttaactttaagaatgatgatctgtatttgcctataagttcggattatgttgtatcaaatgttaatgacgaaattaaattaagtaacctgcctatatattattttgtagagggtatgtttattacttttggagcagatgaaaatgtcaaatataatgatgattatggaacaattctatcttatataccagatgcagaagaatgtgtgaagagtctcattgcagatagaataaaaaaagatagattagaagacgcgtatattttattaaagggactttataggtatacaagagaagaagaaattttaactaagcttctagcggtaggagaaacaataagggaaaaagattctggattttcggaaattttattagaagatattgaagaatttaaggaaaagtttgaaaaatctccagaaccacatctttataatgcactgatacttaaagatgatggtgattataaaggtgcagaagtggaaataaatgagtatataaataagggcggcaaaaaaacagatgaaattgataagatgataggtgatattactaatataagtcattttgagaaagctgttgaatatttaaaagatgaacctaagaaggcaatagaattgttactaccactaagcgaagaattcaaagaaaatcctttagtttactattatctaggtgtcggttatagaagaattgaaaactataataaagctattcattacttgaataaaagtcttactatagaatcaggaagccttgaaacggttaatgagcttggaatgaattatgcttgcattggtgaatatgaggaagcaataaaatattttagaaaagcatttgaagcttcgaaggaagttgaaatttgtactaatatagtaatgtgttatataaacttaggagataaagagcaagcaaaaattcatttagaacttgcaaagaaaatagctccagaagatgatatagtaatagagatagatcaaatgttaaatagaacaataaaataaaatgtcaatgtacagtgcacaatgcacaactaacagtgcacgattaagaataaaataagagtttaattctggaattgtgaattgtgcattgcctaagttttaggagagaatatgtttacgaaaatacttgattttaatatttttaatagggataaaactgctttaatgaactatattgaaaattttgaaaaggtaaatataatatcgggaaatccagaagttctctttaatggattaaataatcctgtacttaaaaagaattttgaaagcgagagttcaattattatacctgatggcgttggaactgttattgcttcaaagatattaagagagcccgttaaagaaaagatagcaggaatagatgtctttagagagatattaattaaagcaaatttagaagaaagatctatatatttattaggttcaaaagaagaaactattaagaaatgtgttgaaaatataaagaatgagtttcctaaactaaagatttctggttttcataatggtttttttgatttaaataattgtaatgatataattgaagatgtaaaaagtgggaatccatgggccgtttttgttgcaatgggatcaccaaggcaagagatatttattgaaaagattattggcgattcaaatattcatatttttatgggtgtaggtggtgtttttgatatatttgcaggtgaacttaaaagagcaccaaaatggatgatatctttgggattagaatggttatacagagttattaaagagccatttagaataagaagattacttgttattcctagattcttattgttagttatttcagaaaacttagctaaaagagtaaggatgatactgtttaaggaagaggaaaaataatgaaacaaagaagtagcttaattaaatctacatttattataatgatagtatcattgattagtagatttttaggttttgccagagatatgcttattgctaagaattttggcgctggaatatatactgatgcttataatattgcagtatctataccagaaacaatatttactttagttggacttgcaatttcaactgcatttttgccaatgcttagcaaggttcgagctgaaaagggacaaaaagagatgaatgattttgcaaacaacataataaatatactttttattatatcattatttctttttgcaataacaagtcttttttcaaaggaaatagttcatatattaggaccggctgaggaaacaggactaattgcagtaaagttattgagaataacccttgtaaatattttatttttatctgttaatgcatgtttcacagcattattacaagtaaatgaagattttgtaattccgtccattttaggattgttttttaatttgcctatgatattatatttattgttgtttaagaattatgatattttaggattgactattgcaaatgtaataggtaattttttcagagtagcagttcaggtaccatcgttagttacacaccaatataaatataaactttttataaatcttaaagatgagagactgaaaacaattatggtattaattcttccagtaattattggagctggagccaactcactaaatatggccgttgatcagtatattgctttgaaacttccagaaggttcggtttcagctttaaattatgctcagaagttaattgtttttataaatgcaattataacaacatcggtcactagcgtagcatatcctcttatggctaatatgagaaatagaggagatgtacttggatttttagaaattttaaagaaatcaatcatatatttgtctatattgttaattcccattactgtcggcgttatgatatttagtagagacataataacaattgtttatgctagaggagcgtttactggttatgcaataaatattacaacacttgcattactaggatatggagcaggaatattttttacaggagtaagagatatattaaattcaactttattctcaagtggaaagacaaaagtaacagcaataaatggtataattggtgttgtgattaacataatatttagcataactttatctaagtatataggtattatgggaatagcattagcttcagttatagctatgatagtaacatcggtactcttatttataaatataattaaattagaaaaaagctttaacataacagagatattaaaaaaagtaagtataataataatgaattcaataatcatgggagcggtacttttaacgttattaatttacttcaaaaataaatttaattcaattacaatcctattacttggagcgagtattggagcagctatatatcttagtttatgttatttattcaaggttgaagaactaatagaaataaaagaattaatcttaaaaaagataaagagataggaggagggtatatgaagatattatttattgcctgctattcaccattgataaataattcagcagctattgaaactttacaatatctaaataagttaagtgagattaataataatgaagtacatcttctgactgttaattttcctaaagattcaatatattatgatgaagtattacgctctatgatgaatgataaaatcaaaacgcatattattgatggtggacttatctttaaaaagtttatgcccaaaaatagtgaaagctacaataattcgccttcaaaaataggaaataccaatagaagaaaagtgttgcggaaaataaaaaatgcattagcgataccagatatgtattattcatgggcaaggaaagcgggaagatatggaatagagctaatggggaaagaaaaatttgatgttatattttctatgcatgagccgccatcttcgcatttatgtgcttattatataaaaaaacattatccaaatgtaccatggattacttattggagtgatccttggcttaaagattcaacaagagaaaaatcttttattgtaaaaaaggtgctagaaaaaaatatggaaagagatattgttaatctggcagataaatttatatttgtgactgatgcaaatagagatgaatatttaaaagattataatattttagataatagtaagacatttatattaaatagaggttttgatgcgaaattatacgataaattattacatgaagagaaacctaagcttataaagaaagacaaacttaatataatctatacaggagaaatattttctaaacttagagatataagaccttttgtaaaagcacttgaagaaataaaagcagagaacttagagatatataaccagttaaatgtattattttttggaaatatagatgatatagaggctaggaagaaacttcaaaatttagaaatagccaatgtatcgcctaggataccatttgatgaggcgcttaaatatatgttaaatggagaggttttgcttttatttggtaataagaattcaaagcaaataccagccaagatttatgactattttggggcaaagggtaggatatttgttatttatggggataaagatgatccgattaaaagagtggtagaaaatcatagaaaatgtgttgtaactgagaataatagtaaagaaataaaaaatcatatctataaattaatagaaattcataaaaataatgagatatattgtgaaccagatgttaattatgaatggaattcaattgtggaaaggctaaacaatatattagaaggaagtgaataaatgcacataatggttattccatcttggtattcatctccaagaaacaaagttcatggaagtttttttaaggaacaatttaaagctctttcaaatagtggagagaagattactgttgcatacaatgaaatttggcctattactatgtttggaaaaattcatgaaaagagaggcataagttttaatatagaagataaccttagaacttataggtataaagattataattatttacctaaaagtccattaatgtttaagagtttcaataaaagaatggataagatgtaccaagaaattgttaaaaatgaaggaaaggttgatattatccatgctcattcagccttttgggggggaatagcagcttcatatataagtaagaaatataatgttccattagtattaacagaacattcatctcttaagtatgcaaagtatgctagagaaagttataaaaaatatatttacaatgcttatgagaattcggattatttgattgcagttgggtctggattaaaaagagaaattcaagaatatgtaaataagcctgttgaagttattcacaacatggtagatttgaatctattttctgtggatgaaaatattaaaaagagtaccgatatagatgaagattttaaatttttttcatgtgcttttcttgaagaaggaaagggaattgaatgtttaattaaagctttttctagagctttcaaaaatgaaaatgtaagcttaagaattggtggagacgggacccttaaaccatcattggaatcacttattaaagaattgaatattgaaaagcaggtaatacttctaggagctttatcgagggaagaagtttcgaaggaaatgaagaaatgtgatgcatttgcattaccatctgaacatgagacatttggagttgtatacattgaagcgcttgcatgtggaaagccagtaattggagctgataacggtggcgcagaagatattataaaagaagataatggaataatagctaaaaagaatgatgtggaggatttagccgaagcattaagaaaaataaaagaaaatcataaaatgtatgataaatataaaattagggaacaaacaatttttagctattcagaaaaagtattagttgaaaagctaaaaggagtgtataaaaaagtatatgagagaagtaattaaaaatatatatgattttttagataataaattttattttaagttattgtacttatttgtaagcttaacatttgtaactatgctcaaagatgtgccaggaagaaaaattctaagtaatataacactagcttgggggatacttttaattctattcatggttatcgaaggttataaaagaagaaaaatttataaatttgatattccattggcattatttatgatagtgactttaatatttaacatttttatttatagaagtgttgataatattaaagcttggatagttaatttaattatatttgtagtaatattcacagttgatgtatttaaatccaaaaagaaacttattaaagagatgaacataattacttattcttatgtaatatttatgctagttgcttctattatatcgctagcaatgagatattcgggaataaatatagaaatcggacaagtggtatttggaggtacaaagggagtctttgagaatgaaaatgctctttcgatagcatcttcactagctatagttatgtgtgtataccttaattatatatcgagaggtcacaagcttaagatgttgtggataggaaatataatattacaagcggtaactatgattggttcacatggaagaagtgcatatttggtaataatagctgtaatatatctatcaatatttatatacagtaaaaataaatatattagatcagcacttgttttaataccaatacttttttgtggagcattttttgaaatggttaaaagtcatttggaggcttttacaacagagaggaatattatttggaattcggcatctgtagtaatagaaaaaaatcctttgactggtgtgggaaataataatcttatagaagcggtgagaaacgcaagaataggaagttatttacctggaattgaacttggagggatgcacaatatctatgtgcaaatagccgcagtaaatggaattatttcattacttttatttcttctgttcataggaatgattttgatgtttataatacaacatatagataagttaattagaagagagaaaaaccagatgacaataataacttcgattatagcaggtattcttgcagtaaacttatttgaaagtgtattagtatatacaataagttttatttcaatgatattttggatatacttaggttatctagtatcgattctagataataaaaatatagattaggtataagcaataaggaatataaaaaatacgattatagataggggaatagtattatatgaaattttgtgacgaaactataaaacaatttttaggtgaattagaatcagatttgccagctccaggtggtggaagtgtagcgggtcttattgcggcattatctggtgcattgaattctatggtttattctctgacagtagacaaaaaggcatttatgggtcttcaggatgatgaaaaagaaattataacaaaatttcaaaaggaatctaaagagttcactgtaagaagcttagaacttatggaagaagatagagaaaactttttgaagttaatggattcttataagttgcctaaagatactgaagaagaaaaagaagagagaaaattagctataaaagagaatactataaagtctatggaagcacctttaattttagctagagaaagcttagaattttataagaatcttaacatcatggcacagtatggaaataagatgttattatcagatttggcaatttcagcaattttactacattgctctatagaaagttccataataaatgttgaagtaaatttgaatgggctcagaaatgaagaattttttgagagacttgatagtgaattgaatagtattatagaaaaatcagctaaagaaaaagaattgattacagaaacagtaaataaaataatttatccaaaaatgtagcaatacaaaaatcattaattataaaaagagatacttaccaagggttcaattaaagtaagtatctcttatgttcttttattctattggttctccatcaaaattttcgtattcaggtctattttttggatcgccaacattatcttggttagcatgaagtcttctccttcttacacctttttgcattggattgcttgatcctggtttgtgtggtccatctttacgtggcatataatacacctccttttttatattttgtgctcatatgaggttttgatacgtttaattttttggtgatttagggattaataaaggactaaggaataatattaacaagtattgaaaaagattgcatatatactgtataatatttattaacataagatatgtacttttaacataaaaaatatgcataatttttaagtgagtatatattgctatttatattcaaacacaaatacataaaccaattataagctatatgaataagttcggatctcacttagtgtgtctatatattatagtaattttaaggaggaattagcattggaaaaagaaaaatttcctattgttttaaagaaaaaaaatggtgtaatgataggggttgcaataatagagataattataggaataatatttggagcgttacaaggaggattaaaaagtgctcctatgtgggtgcttttttttgcaggaatagttactgcactttctgtttttgtggaatatagtcaggacatattaattaaagaggatgcaatagagttttataggaataatgatttgataaaatcgattaagtatagtaatgtaaaatctatttttataggaaaaggaaatgagcctagaaataagagaaaagatttttttgtaattagcttttataaaaatgataagaagaaaaataaaaattctgcggaggacacatacttaattaatcctatgtcatatagtgctgaggattttagcgtaataaaaaatattattgtatcaaaaaattcttctgttaaagtaagcgaagatgtaagtaaatttataaagtaataattatataaaatagctggttaggagattgttctcagaagtttcttgacttgcaataacaatgaataaatgactatagattaaaaaataaaagttaaaacattttagcatgtaactaagatttattcaaaacatactaaaatgatataacttttatagaatatctatagttattcttgttttaaaagtgtttaagtgaattcaaccattgtatggaatttttaatatattctatagctgaatttattattctgtaggtagatcattaagtgatttaaattcataaccttcctgctgaagtgttttaataactgatgacaatacttttgtatttgtgtttgaaacagcatgcagaagcattatggaacctggatgggcacctttgcatattttctccacagcataactttctgaaggttgattatttactaaccaatctttataagcgaaactccagaatatagtcttatagcctaaatcctttgtcattgctaatgatttttttgaatacttacccattggtggtctgaaaaacttaggcatatcctgaccagtaagttctttaaaagcattttctactccagtaaattctgcctcaaatttttctttatcacgtatttgagccatagaaggatgatgaactgtgtgatttccaactacatgtccttcatcaaccatacgtttaattagttctggttgagtgtctatgtatggtttgacaacaaaaaaggcagcagggactttgtattcttttaatatatctaaaatctttccagtgttaccattttcatatccttcatcaaaagtaagatatagaactttttttgaagtatcacctaggtaataagcagaattttcttttaagaagctaacggattcctttgggccttccgcaatttgatcttttcctttaccaacgtaataccagttaagttcatcttcatcactaaaagaagaaaaaatatctcttatgttatcaacatctaaaatatctccaaacacgccatcttcttgaaaacattcatttgaatcggtctcattatcacttgcagcaattgcaggctttgtaggaacaagagtaattagattcattgctaaagaaagagcaattaaagattttatagacttattcattttctcaccttcaatcttaaaaatttatatatttaattcagatttattcaagaaaaatataaagtgaaactgattcaggtggagtttgatccacaactgaatcttagttgaatttatctagaatcgtgccattgttatctaccacttaaagaagtgttatattacagtagctagacataagataaaattcaattgaagatattgaataaatgattaaccaagtatagtatttgaacattgggtaggaataaccgtggtaaattatatataattttagttcaaaaggaatacttgcatatatgtcgcttatcaggtaaatcatataattatttaaacgtaagtttgtggcggattaaatatttataatatagatataattagtttttttacattactattaagtgcagtatctttgcatataatttctctatggtaattgattattacagatgcctgaatatgccttttgtaataatataaagttgaaataaaaaaggttctagagtataatttttaaaggtatattaaaagttagaagttaaaagtgagaaaggaatgtacatagatgaaattaggtatggtaggtttaccaaatgtaggtaaaagtacgttgtttaatgcaataacaaaggctggggctgaatcagctaattatccattctgtacaattgagccaaatgttggtgtagtaagtgttccagataaaagattagacgttttagaaaaaatgtataatacaaagaaaaaggtatatacagcaatagaattttatgatatagcaggattagttaaaggggcttcaaagggtgaaggtttaggaaataagtttttatctcatatcagagaagttgcagcaattgttcatgttgtaagatgttttgatgatggaaatgttgttcatgttgaaggttctgttgatcctataagagatatagaaactataaatttagaattaattttttcagacttggaagttttagagagaagaatggaaaaatctataaagcttgcaagatctggtgataagactgctaaatttgaatatggagtaatggaaagaattaaagaacatttagaagcaaacaaaccagttagaactttagaagttactgatgaagaagaggcatttataaagagtttatttttaattacttcaaagccagttctatatgcttgtaacatctctgaggatgatgttatggaaggtaattttgataatgattatgttaaaagagttaaggaatatgcagctagtgaaaattcagaagttatggttgtaagtgctaaaattgaagaagaattatcaggtcttgatgatgaagaaaaagctgaaatgttaggtgaatatggtttagatgaatcaggattagataaattaattgaagctagctataaattacttgggcttatgagtttcttaacagccggagtacaagaagtaagagcttggacaatcaaaagaggaactaaagcaccagcagcggcaggtaagattcactctgatatcgaaagaggatttataagagcagaagtggtttcttataatgatttagttgaatgtggttcagaagctgcagctaaggaaaaaggtaagtttagactagaaggaaaagactatataatgcaagacggagatgttgtcaactttagatttaatgtataattatctaaaaaatagcatttaaagcgctaaaaaagagcaggattaaaatcttgctcttttttagcaataatgagagtacaaaatattaatgatataggaatattcaaaggcagaaaatttaattagatattgtattaaaaattttaatctagtagtttattgatttaaaatgtaaaagttttaatatatttatgaatatatagttacaatttaatgaatgttagtcaaaaagtagatttttatatcaaagtttgttaaaatagaggacaagtatgaattgattataaaagtaaggtgtgatttattcgtgaagaaatcagttatagagtatataagcggttttagaaatagcaaatattttacgtacataaatgatttgaaaaaaagtaagtattttagatacataagcgacctcaagaaagacagatattttactccacctgtaattatagtaatttgcctaagtgcagttatgataaccaatgtaatctctaaatctagaattgagccatcaaaagataagcttactattgcagctaacagtgctgaagagaatttttataatgataagtatgatgccgcgattgaagaatataataaatatcaagaaaaagatgaatggccaatatggaatttaaagattgcagaaatttattcagtaaaaggagattttgcagattcgaatgagcttcttacaaaagtttatttagctagaaataagatagttgatggtaagaagcaaaaaaatatagaaaattttgagtctaaagatagagaacttaccaattacatagtgtttacgtcttttatgaacggagattatgataaggccttacaatatggcgaattgtttttgatggattacccaacagataagaatttgttaaagacaatgtttagtatttatatggcaaatgataagaaagataaaatgaaagaaataattgataactacccaagagatgatgaaaatgcatctgatttggcagatttagctagaatgaatatgatgatgaataatttagatcaaggacttttattattaaaagatgcatggcataaagataaaaatgaagttaaggtttttgatgtaataacacaaattgcggaatataataagaatgacattttaaataagatttcagcacttgagaaaaaagattcaggtgaacttgcgtataagatgtggcaagcagagatttactctaaggataaggaatcggctgaaaaagctaataatttaattagtgagttagaaggtaaagatgttggaagtataaatttagcacttattaaatctaacacatatcagaatttaggtgaatcagaaaaagcaagagatgttataaatgaaatgataaagaatgatccaaactcattcataggatatcacgcaatgtcattggaagattatagtgatgaaaattatgatgatgcacttaagaattgcgaaaagagtatatctctaaacaaagactatgcagataactatggattcttgatgccagagataatggagaaacaagataagagtgaaaatgcagagccgtattttagaactgctttatataaggaaccttttaattataatatattaattaaattagctgagtattatggaaatacagttaaggatagttctagggcattatactattataccttagcatctaaaatgaatcctaatgatgcagaagtatattataatatggcattaattaaagtagcaaatcaaagacaagacgaagctatagatttattgaaaaagagtatagcaataaattcaaaagaaattaaatatcatagggcgctaggaactgtgtatttaaataaagaaaaaggtgaggatgctcttaaggaaataagagcggcatatgctattgataaaaatgatatactaacactaaataatgctggatgttattatgtagctatagaaggagatttaagcagagggctagttaattttaaagcagcatatgatggcataaatgataaaacaagcgaagaggataaagatacaataagcgaaaattataatagagtaaggaatttatctgatgcatataataaaagaaacggggcaacattaaaaataccagatttaaaattattttattaagataattatttatataatgtaaacttggaaacaagtataaaatagtcatttgatagggggagagtagtatgtatccaattaagtttgaaaacctatattacgagagaatatggggtggaaaacacctagagaaatttagaaataatgttccagaaggtgtaataggagaaagttgggatatagcttgtcataaaaatgggactggtaaagtagaaaatggagaattaaaaggtaaaacatttgatgaaataataaatctatatggagaaaaacttttaggtactgaaataagtactaaagaatttccacttttaattaaactaataacagcagaagataaactttcagtccaagtccatcctgatgatgagtatgcaaataaggttgaaaaagattctggaaaaacagaagcttggtatgtagttgatgcagaagaaaatgcttcattaatagtgggaacaaaagattgcgataaggaaaaatttaaaaaagcaatagaagaaggggaattagataagtatttaaataagattccggttaaaaaaggcgactttttctttgtgaaaagtggattagttcatgctatatgtgaaggggtattaattgctgaaattcaacaaaatagtgataccacatatagagtttacgactataatagaggccgtgaaattcatgtagaaaaggcattagatgtaatagatttttctcttaaaggggagaattcaaaaggaattctaattgagagagatgggtatgataaatcatatctttgtttagacgaatattttacaatacaaaaatataaaattactacatctgtaaaagaaaagagcgatgaggaaagattttatttatttacatgtgttgaaggaaatggtgtaattaaatatagtggtggagaagaaaaaatacttatgggagatagtatcttcattccagcagctcttggagattacgaattagttggtaattttacagtactaaagagctacgtaccaaacataaaaaatgaagaaaaaagcataatgagtgtaatagagaaataattataataaagattaagggggaactattaagttgctccttaattgtttgagtaacttgtaaaataagaatttgattaaaaaatagtcattatatttatatattcaaataataaattgtgtttaggattttataagcattaaaattggacaaggcattatttatcttagagatagagagcaaagtaaatttaggtgagagtgaagagaactatagtggatttataaaaaaattaataaatttttaatatgaaataaagcctaataggtttaaaatatattaatatggttaaaaaagtaaataactaaacaaaaaagaaagagagtgaaaattaagtgggattggatattttatttataatcaaagctataataatagcaatagttgaaggattaacagaatttattccagtgtcatcaactggacatatgatactggcttcaagcatcattaattttaaaggtgactttgttaaaatgtatgaggttgtaattcagttaggggcaatattagctgttgttgttttatattggaagaagataaaagacagcgtaattgaatttttcagatatatatttacaaaaggaaaagaaggtaaaacaggctttaactttggtataaatgtaataataggatgcataccaatgttgataataggattattattttataaaaagataaaaagtttatttaatcctgaagctgttgttataggctttatagttggaggtattctattaataataattgaaaacatgtttagaaaaagtaacaagcatgcaacaaagagtttagatagtataactccaatgcaagctctaaaggtaggagtattacaagtactttcagtatggccaggaatgtcaaggagtgcatcgactattatgggaggatggattgcaggcctttcaacaccaatagctgctgaattttcattctttttagctattccagctatgataggagcatctgcaaaagatcttatggaatttgattattcaggaatgaatatgacttcatggatttcattagtagtaggttttattgtggcatttgtagtgtcagtcattgttatggataaatttgtttcttatttgaagaaaagaccaatgcgtgtatttgcagtgtatagaataggtgcaggtatagtatttggaatacttatgttctttggttttttaaatttcacattataaaaagaaagagttggattagctgcacgctaattcaactttttttattctttaggaatttatattccaataaaatctgtggataacttaaaaaaggttgattgactagttttggtattttaaaaagaataaaaaagaaattttattcgcctgccaaatttttctcacatgcgtttgaaaaggcagatgcgtgaaaaaatctcaggctccacagtcgcctgcgattttgttctaaaaaagaattaaatttaactgataaaacaaataagtgtatttaaatagtaaatttatatttatcatttaaatacgttaagagtttaattgggattaaaatgtagaaacgcaattaagcatatatgctagaaagaaacgtaaataacgataacacttaagattaattattataagaagttaattataagctaatagttaataatctacggaatttattaataaaaatagaaataacacttctaaatattaatttataaaatataatacttaatgtaagtttgggtatagtaattaatgtaggtaaaattcaaaatagtctttctttagagtaagcttggatcaaaattcctaggaataataatgaatatttaagagaaacgactaaatattaaaattaaaaatttcaattcttatttaaagaatgaatatattgtaaattaatacttttcataaattaaagtttgtgatattattaagtaaatagtcagaaaataatgataatttaatcggaacaataatttccaatgaagattatggtatagggggattagaagatgtccaaagatattaaaaagatagctctattaactggaggaggagattgcccaggcttaaatgcagtaataagtgcagtaacgaaatcagcaattttaaattatggatatgaagttattggatataaattcggttacagaggattatataacaatgattttatttcattagatttaggagctgtatcaggccttatatcaagaggaggaacaattctttatagttcaaataaagataatttgtttgattactcagtagaagaaaatggtcaaatagtaaaaaaagatgtatcagatgtagcagttgagaatttgaaaaaagagggtgtagacgttttagttgtaattggtggagatggaacattaacatcagctagagatttttcgagaaagggagtaaatgttattggtgttccaaagaccatagataatgatttagggtcaactgatgtaacgtttggctttaatacagctataggtatagcaacagaagcattagatagactgcatacaactgcagaatctcatcatagaattatgattttagaagttatgggaaggaatgcaggttttatagcattggaatcaggaatagctggttcagcagatgttatactactacctgaaattccatatgatataaataaagttgtagaaaaaattgaagatagaaaaaaacatggaaagttattcactataattgttgtagcagagggtgcaaaacctaagaacggcgatgttatagtatctaagatagttgaagatagcccagatccaattagacttggtggtattggaaataagatagctgaagatttggaaaagttagttaaagatagagaagttagatgtacagttcttggtcatattcaaagaggtggaactacatcaacatatgatagaatattatcaacaagatatggtgttgaagcagtagagcttattaataaaggtaagttcggaagcatggtatgcttaaaaggtaatgaaattacttatgatagtttagaaaatgtcattggtaataacaaaaaagtagatcaagatggagaattagtagctgtagctaagagaatagggatatcatttgccgattagttaacttaatatgagtactaaattatactagtaatttagtactcatgagatacctaatgacatttagtagtatttttagaaagcggtgggtattatgaaagaaataaaaagatatttagagtctagaataggaacatattcatttttctttgaagatttagaaagtggttttagttatggatacaatgaaaatgttcaaatgacaagtgcagggtgtatgaaattgccgatagcagtatctataataaagcatgttcaggaaggaaacagtacatttttagataaaataaaaattgaagaagaagataaagtttatggaacaggaatactccatgaatttgataatagagaatatactatatttgaattgttagttgcaatgcttatacaaagtgataatactgcagcaaataagcttatagatatagttggtatggataagataaatgacgatatagaagcacaaggattgaaaaatactaaattaaatagaaaaacttcagatgaaagagctgtaagtaatggaattgaaaatataacaagtgctttagatttatcaaagatatggaaacacttatataattcaagctttttagatgagaaaaatagcaaaatgcttatggatatattacaaagacaacaaatgaaaaacaaattagcactttatatacctgatgatttaaaatatgaaatatcaagtaagacaggtgataaggctagcgttgaaaacgatacagccttgatccactcgccaaaaggatcctttacatttactgttctttcaatgggaattcctaatagcgtttatggaacagttactcttgctaaatgtggaaaaatgatgtgggataacataatgaataacttttagagacataactaataactcctagaaaactaggagttatttttataacctaattaaaatttaaactaatttagctgaaatttatataaataatttttattgacacaacctcaaagaaatggtattcttacacaaagaataacctttaatttgattcagagaaatcaataaggaagttatataataccaataatctaggattattatgccttcctttatattaaggaagcttttttattctctagaaatttatatttaagttaaatctgtggataagttattaaaaagacagatttagaaagctacggtttgtaagaagaataaaaaagaaaatatattcgcctgccaaatttttctcacatgcgttcgaaaaggcagatgcgtaaaaaaaatctacggctccacagtcgcctgcgatttttttattataaagaattagtattatataatttttccctttaaattaacactgagaggttaagaaggagtgataataaaatgataaaagatattaaacatctaatagagcctatggattttacagtagaggaattagatgaaatattcaatttagcacatcaaataatcgcacatccaaaagaattttctcatatttgtgacgggaaaattttagctacattattttatgaaccaagtacgagaacaagattgagctttgaagctgcaatgatgagacttggtggtaaaattctcggattttcagagccgaattcaacatcaatttctaaaggagaaactttagctgatacaattaaaatggtgtcaatatattcagatataataacaatgagacatccaaaagaaggtgcagcaaaagttgcaagtatctattctaatgttccaataattaatgccggagatggtgggcatcaacatccaactcaaaccctagcagatttacttaccattacaagcttaaaaaatggtttaaataatcatagaatcggaatttgtggtgatttaaaatttggaagaactgtacattcgttaataaaagcaatgtccagatataaaaataacaagtttgtactaatatctccaaaagaacttgctataccacaatatataagagaagaagttttagcgaaaaatcacattgaatatatagaggtagaaaaattagaagatgtaattgaaagtcttgatatcttatacatgacaagagttcaaaaggaaagattctttaatgaagaagagtatttaagactaagagatagttatatattagacagagcgaaaatggatctggctaaagacgatatgatagtaatgcatccgctgccaagagtaaatgaaattgcttatgaggtagatgaggatagaagagcttcatactttaagcaagctgaatacggaatgtatgtaagaatggcgctaatgattaagcttttgggggtgatgtaagatgcttgaaataacaagtattaagaatggaatagtaattgaccatatccaagctggagttggagttaagatatttaagtacttaaaactagacactaatgattgtagtgttgctctgataattaatgcagatagtaagaagcttggaaagaaagatataattaagatagaaaattgctttgaacttgactatactgttttaggcctgctctcacctacaataacaatttgtgaagtaaaagatgaaataataataaataaagttacgccaacgctacctgataaagtagagaatataattaagtgtaaaaatccaagctgcataactagtcaggaagaatatgtacctcattcttttattttagtagataaagagaatggaagatatagatgtgaatattgcgatgagataacaaagctttcagaaatttagaagaattaagaggtgttatatggaactgttaattaaaaacgcgaggatagtagatgtaacccaagattttataggcgacatctatattaaggacggaataattgaagaaatagggcaaaagatttttaagaaagatgtagaaactattgagtgtgaaggaaagatcttaatgccatcatttatagatacacatgcacattttagagatccaggtcttacatggaaggaagatattgaaacaggatctagagcagcactaaaaggtggttatacaggagtttgccttatggcaaatacaaatcctatatgttcatcaaaaaaggttctagaatacgtaagaaataaagctaaagaaattaatttaatagatattcatcaatgtttatcagtaacaaaggattttgatggagtgacattaactcatttagaagagcttgcaggcgataaggaaattaaagcaatttcagatgatggagttgggatatcaaactccaatacaatgcttgaagcgatggaaattgcgaagaagaataactgggttataatgtctcatgccgaaagtcctgaattctcaaaagtagatatgaggatagctgagaatatgatgacaataagagatgtagaattagctaaactgagtaaagctagattacacatgtgccatgtcagtacaaaggaagccataaaatgtataattgatgggaaagtgagtggcgctaatataacactagaggttactcctcaccatattggtctaacaagagatataaatgattatagagtaaatcctccaattagagaaaaagaggatgtagaagcaataataaatgccataaaattaggtatggttgatacaataggaacggaccatgctccacatacagcagaggagaagatgaaaggttcacctggaatggttggaatagagactgcattttcaatatgttatacgaaattagtgaaagagaataatatttcactaaataaattaagtgagcttatgtcatataatcctgcaaagcttctaggaatgaataaaggaaaaattagcattggagtagaaggggatttagttttagttgatattgataaatgcctaaaagtgaatccagaagaatttgcatcaaagggtcggaatacgccatttacaggtatggaattctacggtgaaattcttatgacaataaagggtggaaaaattaagtatacacatataaaatgtgcgcaaagcgcaataaagaacagtccacattagaaaaaggcgcgaagcgtaacagataacatttgatattaaaaaaagtgcgcagcacaaaagaggacattttgtattaaaaaagcacacacatatgaaatatgagagaatcgcaataaagaactttttagtgaattaagaacatttcatatcaaaaaaagcgtacagctcgatacagaacttttaagtgtaactatgattataaattaggaagcggacacgtgtaaaataagagtggtttaaatagtagcatgagtagaaaatggagaaagtaattaagaaaattataagatatgagttcctaaagtaattcattgtgaattctgactgttgactaaatagggttggagggagatttgaaatgacaaattacataattgataaattatacaatagagttgaagaaagaggagtagtttgtgtagggctggatactgcattaagctatattccagatcatataaaagaaggtagaactgacagtgaagctatctttgaattcaataaacaaataatagatgcgacttgtgatgtatcagcatgctttaaagtgcagattgcttactatgaagcattaggattagaaggtttaattgcatataaaaagactttagattatttaagagagaaagatgaaattataatagctgatattaaaagaggggatatagcagcgacagcaacaatgtatgcaaaggctcattttgatggggattttgaagcggattttataacgctaagtccatatatgggaatggatagtattgaaccatatctaccttatttagaaaagggaagtaaaggtgtgtttagcttagtcagaacttcaaatccaggtgcagaagatattgagtatctagatactactggagataagaaagtttatgaagttgtggcagataaaattactgaaatgggaaaaaattatactggaaattgtggatatactgcgatcggaggagttataggttgtacttatgttgaagaaggaaagaaaataagatcaaattatagcaatatgtttttcctaatacctggatatggtgcacaaggcgggaaagctgaagatgttgcactatatttaaacaatggaaatggtggggttgtaaattcttcaagaggaatactccttgcttacaaaaaagaaaatagagaaaaagagtttgctttatgcgctagagaagaagcaataaagatgagagatgcaataagagaagcagtgaagaacgtataaattttatattaaagataacttaaggaggcagggttatggctataacttacagaaatgcaaaagtagtttcaaataaggaaatctcgaaagatatatataaattagtagtggaagatgatgcagaaataaaggcaggtcaattttatatgttaaagctaaatggtgcaacatttctgccaagaccaataagtatatgtgaaaaatctgagaataaactaacatttttatatgctgtagtaggaaacggaactaaagagtttactaagcttaaagaagatgatgaaataagcttaacagggcctcttggaaatgggtttgatttagagaaagaatataacaagatagcactggtttcaggggggattggaacagcaccaatgcttgaactagcaaagaaattaagaaagaaaaacccagatcaaaagatagatctttatgcaggattcagagatgatgtttacttaatagatgagttaaaggaatacgtaaatgaagtttatatatctacaaacactggaaaacatggtcataaaggatttgttactgaaattttaaaaccagaagattacgatacagttttatgctgcggaccagagattatgatgaaaaaagttatagatatgtgcaaagaaaagaatgtggaggtttatgtatctatggaaaagcatatggcatgtggagtgggggcatgtttagtatgtacttgtaaaacaaaagatggacataagagaacgtgtaaagatggtccaatatttgatggatactatgttgaactataataaccaaaggagaagaagaatatgatgaaagtaactattaataacgtagaatttaaaaatcctgtaatagcagcatcgggaacctttggttttggtgaggaatttaataatttttatgatgttggaattcttggtggaatatcttcaaaagggcttacaataaaccccaagcaaggaaatgaagggataagagtatatgaaacaccatcaggaatgatgaattcagtaggattacaaaatccaggaatagatgcatttatagaaaatgagcttccgaaaatgagaaagtacggaactaatgttatagcaaatattgggggaggatgcttggaagactatgaagctgctgtaaggaaaattgatagcagtgatgttgacatgattgaacttaatatttcctgcccaaatgtaaagcatggtggtatggcttttgggattaagtcaaaagtagcatatgatgtggttagagaaattaaagccatgactaagaagccgttgatggttaaattatctcctaatgcagaagatatagtagatatggctgtaaagtgccaggaagcaggagcggactctatatcattaataaataccttaaaagggatggctatagatgtatataaaagaaagccggtatttaataatataactgcaggtctttcagggccagctgtaaaaccaattgctcttagaatggtttatgaagtggctaaggctatagatattccagtaataggacttggaggaatatcaagtggtaaagatgccatagaatttatgatggcaggagctagagcagtacagataggaacgattaattttgtaaatcctatggcagggaaagaaatagttgaggaaatggaaagtttcttgaaggaacaaggaattaaggatattaacgagattataggaataatataaatagattatagatcctaattactaataatgaaaaataagcaactgataagtgaatattaataattacaaagtagatattggaggaattttaaatgaaggcgtacaagaaagaatttatagattttatgatagaatgtggagtacttacatttggagattttgttactaagagtggaagaaggactccgttctttgttaatacaggaaattatcaaacaggaagccaattaaaaagacttggagaattttatgcagaggcaataaaagaaaactttggagatgattatgatgtattatttgggcctgcatacaaaggaattcctctaagcgttacaacatctattgctttgtctagctcatttgatattgatgtaagatattgctcaaatagaaaagaagtaaaagatcatggagatacaggaattcttttgggaagtaaattaaatgatggagataaagtattaatagttgaagatgttacaacagcaggaacatcaatttacgaaactatgcctatcttaaaaagccaagcagatgttaatgttaaaggtcttataatatcagtagatagaatggaaagagggcaaggagagcaatcagctctagcagaaattagagaaaaatttggatttaaaacttgtgctatagttacaatggcggaagttatagaatacttatacaataaagaaattaacggaactatacttataacagacgaagttaaaggtagaattgaagaatattacgaacaatatggtgcaaaataaaattattgcgaagcactcgaaatataaaaatacttgcaatttcatgaatttttaagtttactgctaagcaactgaaacggaatatatgcgtttgctccggttccttgaagatttcgcaaaaacatatattccatttctgatatttagcgtaaattcaaagtaatgcatatttaagcaagtatttttatatttctttggctagcagtacatttggtataacgcatataaactttagagtataaattaattgacatttttaattcctatttaatataggaggtattgtaatttctttaagatactatttgttaagtatatattgtaatagcagaactaagaaatagaatacatatatgtggagcaggcattgaaaaataagctgctggaatatcttaatggtaagttgttccactttcgcttgtcctgtgcttgtcacaggagcatgcagaagtggtgcaactttctatttagatattccaagagaaatttttcacagtcctgaggaacatatatgtattctatttcggatgtccattgcttcacattaagttgtgatcaaatacatttacaaggaggaaaatatgaatattttaattactaacgacgatggaataaatgcaccaggaataattgctttatctaaggaaatttctaaggcgaataaggttataattgttgcaccaaaggatcaaaaaagcgcttctagccattcaatatctattcatagtccaattaaaataaaagaagaatttattgaaggcttagattgcaaagcttatagtgtggtgggaacgcctgctgattgtactcaagttgggttatcctttttgaaagagaatatagatcttgtaatatctggaataaataagggaccaaatgtagggactgatattttatattcaggtacggtatcggcagcaatagaaggaaccatatatggaattccatcaattgcggtttcaatggatgttgaatatgggaaagataatgaggattattctaaggctgttaaatgggtgataaaagttttaaatatagcaaaggaagaatacttaaaaagtgatgtggtattaaatcttaatattccaaattttaatgaaagagatataaagggcatcaaagtctgtaagattggaaggtcaacatataaaacagaatatatacttttagaaagtgatgaagaaggtgacttgtatacaacaaaaggaaccagaaacactattaaggaagaagaaagtgatttatattatctatctcaaggatatgttacattaacaccgcttcattttgattttactaattttgcaatattaagtgatgttacgaaaatatttgaaaaataaaaggcttgtcatatgcatggcaagccttttttactacttatttataagattatcaatatgaacagtagtataatcattatctttaagtgcttttactatttgttgcaaaggtgatcgtgcatcataattcacgttaagcgtgtttccatttaggttaaagtttatataatctatttctatagatggatgataataaaagctattaagcgtatcagcatctccttcattaatcgtatttaccatacgagttgtatctgttgatggatcagctatacgacctaatggcgttggaacaaataagtgagaatcatctggcttatatatgttcttttttgtataatcatatggctcgtatatgaactgaaaatattcactaattattttcttttgttgctcagtatctctgtaatgagggctttcgtaatacgagataggaatgtttagagcacttgcagtatctatacctttttcaattactgccctagtctcagcttctgtactatttacgtctttagacatttcttcaccagttccgcttgagtcattaccagattgatgagtatatccgtgtaaacctatttctccgcctttattaagtgcataatctaatacatttataaatcctacatttacaatgttatcattcgtcaacaaatcattatcaaaatttgctgaaggaactacaaatctaggtatccatgaaatatgaaattttagtccttgggaaaatagcaaattagccattatctttatttttgtttgatttttatctacaacatttgtataaccgcaaccaaaatcttcaaaacgtattaaaccaattttatcgctatatagtatagctgaatcttctggttcctttacatcgttaggtattaaacttatatttttgttctgaaagtcaaatacggcaaataaatcaaagatctcttctatatctgaaattgaaatataatagcttccattattgttaagtaagttaccacgaagagtaccctttctagaattcttttcataagtggtttcatttaataaaattttattactatcattgtatattgatatggaattattagaagtatctaaagtataattaagtttactgcaaataaaagttagtggtaaataatatctttgggcttttagcagcattggaacattagttagatttcctgtattcaaaatatttagggttacatcatttacctttgttacaggcttgtctgaaaatttaattttgggtgtatatgtacttttaaatttttcctctggtaacatacttgagtataatgttttattaataatagttagattctttctaaaaaaattaaaataagaaagaacttgatataatataaagacagatagagctattgataaaaaagaaaataaagatagtttagcattcctttgcatatgttttctcccctttgaattatgtataaacaatattgtaacaaaattatatcattattttgtgtcaattattttgtacaaatgttaaatttatgttagaaattctaaaaaaagttgacaaagaaaactttttagtatagttttatagccttatgagtctaaaatatgaaattcaaaaatggattttaaaagattgaagaatatttaaaaattataaatgtaaataacattatgtttaaaacgttttctaataatactaatatgtcaatagaaattgatttatacactgaaagaaaaatattataaatttaagaaatggtaaaggttataaaatttgcagttagtaatctattgataaatgaataaataacttgagttatttatcaataatattttttataaattaaagataatatcttaattagtgataagtgaaaagttaaaagggaggattttagaagtattattttatgaaaagccgatggctttttttcacttccaatagttttattgacaaaaagcgaaatcaattactaattgataaaagatatcattgacatgtggttgattaaagtatacaataatggtatgaattaattgattaaaaattaacaaagtttttaatcaaaagtataaaggaggaaaactaatgtttaaacaatgggatggatttaaaaacggaacatggcaagagagtattgacgtaagaaactttatacaaaaaaattataagttatatgaaggagattcaactttcctagaagataaaactgaaaaaacaagtaaagtatgggcgagagcttatgaattaatagtagaagaagttaaaaaaggaattatagatgtagcgactgatagagtatcaggcatagataactatgatcctggatatatagataaagataacgaagttatagttgggcttcaaacagatgcaccacttaagagaatagtaaatccatttggtggaatgagaatggttcaaagctctttaaaagaatatggatatgagttagataagaatatcgaagagtattttcctaagtatagaaagactcacaacgaaggtgtatttgatgcgtatacaaaagaaataagagcagcaagaagtgcgggattattaacagggcttccagatgcttatggtagaggaagaataattggcgattatagaagagtagctctttatggtatagattacttaatagaagaaaagaaaaaggatcttgataatctaaatggtgatatgcttgatgaattggtaagaaaaagagaagaagtttcaatgcagatcagagctttaggcgaagtaaaatcaatggcagcgaaatatggaattgatatatctaagccagcatcaaatgcaagagaagcagcgcaacatttatactttggttacttagcaggaattaaggaaaacaatggagctgcaacatcatttggaagaacttcaactttcttagatatttatattgaaagggatttagaagctggattaattacagaaaaagaagctcaagaaatagttgatcaattaatcataaagttaagattggttagacacttaagaactccagaatacaatgagttattcggaggagatccaacttgggtaactgaatcaattggtggtgttggcattaatggtaaagcacttgtaactaagaattcatttagatatcttcatacattaataaatttaggaacatcagcagagccaaacttaacagttttatggtcagataaacttccagaaaactttaagaaatattgtgcagaaatctcaataaaaacagactctattcaatatgaaaatgatgaggttatgagaccaatatatggagacgattatgctatagcttgctgcgtatcagctatgaaggttggtaaacaaatgcagttctttggagctagagcgaatatagctaaatcacttttatatgctataaatggtggagtagatgaattaaaaggcattaaagtagtacctggaatcgaaaaacttacagatgaagaaattcttgattttgataaagtaaaggcaaattacttcaaagtattagaatatgtagcaaaagtttatgtagatacaatgaacataattcactttatgcatgataaatatgcttatgaagcaagtcaaatggctcttcatgatacagcagtagaaagattaatggcatttggtattgcaggcctttcagtagctatagattcattatcggctgtaaaatatgcaaaagttaaaccaattagaaatgaagatggtataactgtagattttgaagttgagggagatttccctaaatacggaaatgatgatgatagagcagatgatttaggcgtagaattagtaactaaattctcaaatgagcttaagaaacatccactatacagagatgcaaaacatacattatcagcacttacaatcacatcaaatgtaatgtatggtaagaaaacagggacaactccagatggtagaaagaaaggtgaaccattagcaccaggagcaaacccaatgcatggaagagatattaatggagcattagcatcacttaactcagtagctaaaataccatataatgaaatttgtcaggatggtgtatctaatacgttctcaatcgttccagatgcacttggaaaaaatgaagatcaaaagattaataacctagttgcaatattagatggatatttcactcaaggagctcatcatctaaatgttaatgttcttaacagacaaacattaatagatgcaatggaaaatccagataagtatccaacacttacaataagagtttcaggatatgctgttaactttagcagattatcaaaagaacaacaattagaagttataagcagaacattccatgagagcatctaatgagaagtacggtaatgtatattagttaaggattactataaaataagtttttggaagaaggggaaggtgaactttcccttcttttgccttatgatgaataaacaatacagttagatagtattaagtaatgatatggtgtaccatatacaattctcttaaatattaataagcttatttaagggaataataaattaatatatattctaaaagtgttaattcaataagcattctcttaaaatactaaataatatcccaaaataattttatagaggatgaattatattatttagaacttatgtatattaatttgaagtataataaagtatagggggtgtaacaaatggtaaaaggtaatgttcattcaatagagagcatgggtcttgtggacggaccaggaattagagtggtagtatttttgcaaggttgtgcgttaagatgtaagtattgtcataatcctgatacttgggctgctaatggtggagaggaatatactccggagcagttagttaagaagattgaaagatttaaaacttactttgcaagtagtggtggaggagtcacattttcaggtggagagcctttaaggcagccagaatttttactagaaactcttaaattatgtaaaagtaaaggaattaatacttgtatcgatacagcaggttatggatttggtgattatgatgaaatattaaaatatacagatttagttttatttgatataaaacattttacaccagagggatacaaaaatgtaacactaatgaatatagatgaatctttaaaattcttggaggcgatgaagagaaataatacaaagatgtggataaggcatgttgtggttccagggttaacagatgatgtagaacatttaaaggaacttaaaaaatacatcgatgagatacctaatgttgaaaaagtagaattacttccatatcatttattaggtacaaataagtatgaaggactagggattaaatatcctcttgaaaatgtaaaagccatggataaggaattaattaaaaaatatcaaaaagagatatttggagattattcttatgacaaataagatgattgaatggggattttaaatttagtatcaaaattaacttaatgcattatcaaataaaataataggtccaaaattctatgattatttttcattaggtaaagaagcaaattgggcttatagctagtctattagtgtaatctgctgatagaagcataatggaaaataagttttgcagatggatgcgttatttcttgattatacttaacaataataagtgtaaaattattcttgttgacaaaccaaatggtttagtattattcttatattagatattagtcatatgactgacggaagtggagtaaccacatgaagtatgactaggcgtattatcttatatgccacaaaaagccgaccgtctgggcaaaaaagcctggattgtgtcggcttttttatatggaaaaaattatataattgaatttattttagggaggaaaaaatatgtttaaacaatgggaaggattcaaaaacggaacatggcaagagggtgttgatgtaagaaactttatacaaaaaaattataaattgtacgagggtgatggaagtttcttagaagagaaaacagaaaggacaagcaaagtttgggacaaagcttatgccttaatagttgaggaagtgaaaaagggaataattgatgttgctacagatagagtatcagggatagataactatgatccagggtatatagatagagataacgaagttatagttgggcttcaaacagatgcaccacttaagagaatagtaaatccatttggtggaatgagaatggttcaaagctcactaaaggaatatggatatgaacttgacccagaaattaataagcatttttcaaaatatagaaagactcataatgaaggtgtttttgatgcgtatacaaaagaaataagagcagcgagaagtgctggattattaactggtctaccagatgcgtacggtagaggaagaataattggcgattatagaagagtagctctttatggcatagattacttaatagaggaaaagaaaaaggatcttgataatctaaatggtgatatgcttgatgaattggtaagaaaaagagaagaagtttcaatgcagatcagagctttaggcgaagtaaaatcaatggcagcaaaatatggaattgatatatctaagccagcatcaaatgcaagagaagcagcacaacacttatatttcggatacttagcaggaattaaggaaaacaatggagctgcaacatcatttggaagaacttcaactttcttagatatttatattgaaagagatttagaagcaggtttaattactgaaaaagaagctcaagaaatagttgatcaattaatcataaagttaagattggttagacacttaagaactccagaatataatgaattattcgggggagatccaacttgggtaactgagtcaataggtggagttggtataaacgggaagcctcttgttactaagaattcatttagatatcttcatacattaataaatctaggaacatcagcagaaccaaacttaacagttttatggtcagataaacttccagaaaactttaaaaagtattgtgcggaaatctcaataaagacagattcgattcaatatgaaaatgatgaagttatgaggccaatatatggagatgattatgctatagcttgttgtgtatcagctatgaaggttggtaaacaaatgcaattctttggagctagagccaatatagctaaatcgcttttatatgctataaatggtggagtagatgaattaaaaggtatcaaagtagtaccaggaattgaaaaacttacagacgaagaaattcttgattttgataaagtaaaggcaaattacttcaaagtattagaatatgtagcaaaagtttatgtagatacaatgaacataattcactttatgcatgataaatatgcttatgaagcaagtcaaatggctcttcatgatacagcagtagaaagattaatggcatttggtattgcaggtctttcagtagctatagattcattatcagccataagatatgcaaaagttaagcctattagaaatgaagaaggtataactgtagattttgaagttgaaggagatttccctaaatacggaaatgatgatgacagagcagatgatttaggcgtagaattagtaactaaattctctggagagcttaagaaacatccactatacagaaatgcaaaacatacattatcagcgctaacaatcacatccaatgttatgtatggtaagaagactggaacaacaccagatggaagaaagaaaggtgaacctttagcaccaggagcaaatccaatgcacggaagagatattaatggagcgttggcatcacttaactcagtagctaagataccatataacgaaatctgccaagatggtgtatctaatacgttctcaatcgttccagatgcacttggaaaaaatgaagatcaaaagattaataatttagttgcaattttggatggatattttactcaaggagctcatcacttaaatgttaatgttcttaacagacaaacattaatagatgcgatggaaaatccagataagtatccaacacttacaataagagtatcaggatatgctgttaactttagcagattatcaaaagaacaacaattagaagttataagtagaacattccatgaaagtatttagtaaaataaaattattctgtttatagtaaagtttttgataaatttgaatgtactaaaattttaaggaaatataaatagcttgaagctaataaattaattacaaatataaaaagactataggacataataaaatacaccagtccatatagtctttttgatttcatatgaaaatattaatttaaattatctttaagtatactaatttttacgagatgagttaaatataatttttataatgtgttattctagtacagaaaaattatctttgttaaaagcgcaaatgggacatacccaatagtcaggcaaatcattaaaatctacatgtggagcaattccaccatcaggatctccaagttctggatcataaatatatccgcatacttcacaaacatattttttcatcttatcacctcatttatagtttaaacaagacaagaataaattttaaaactgtttaaatctaaaattttagataccataaagaatatatatagtaaaaaccacgagttatagtatattatatgatatttttattgaggtgttaattaataaaaattatattttattttaacccattagagttcttagctagaatatttgaaaaatacccctttggaaagtaccctttctttaatccttcaataacagttaaatatgttgcagctgtatcaaatctagcatcatgataatttccactaccttcaaataatttttcagatgtctcaacaatttgttcatttgatatgtttaaccaatctattacttcagataattttggatttttgatttctccattggcctttggaatcttacatatatctctatagtaagccatagtgcagaaaacattttttgggtaaaaatcttctcctaaagagaacaattcatgttttaaaaatctaacatcaaaattaacattatgaccgattagaaaatcagcagtcataaaatcatcaagaaattcaggtactaaatcctcaaaatattgtccatcagataattcataaagcttctctaaagaaaaaccatgaatttcttgggcagaagggtccatctcatcgactgtaaaaaagaagtttttaccagtagttatctgaggttttgtactagcatcaacagttatgtaacttaactgacatatgctgccgggttttatactagtggtttctgtatcaaaaaataataatttcattaaagtgtacctccatcttctgcgtaaaacatttaaaaacaattacgtctatatgcttactaataaattcattattaagttgctaaatttaattatatagtatttacgaaaaaattcaaataaggtataatcagataagaatgattattaattaataaaattgttggataataaatttataataatttaagatgaaacttgttatgagcaaataataaatttgttatctggaaagaatagaattaatattgtattaattaggaggaatatataatggtagaaagaaaacgtaaaatatctgtgattggtgcaggttttgtaggtgcaacaacagcatatgcattaatgaatagtggagtagctacagaaatatgtttatttgatataaatatggataaagcaatgggagaagttatggatttagttcatggtacttcttttgtaaagcctgttagcatttatgcaggaagtattgaagaaactagagattcagatatagttataattacagctggtgcagctcaaaaagaaggggaaactagactagatcttattgaaaaaaattacaatatatttaagagctttgttccacaactggcagcagcaagcccagatgctattttgttagtagtatcaaatccatgtgatgtgcttgcatatataacttataagttatctggattccctaaggaaagagtaatagcatcaggaactgtattagatacgtcaagattaaaatacgttattggtaaatactttaatgtaaataataataatattcatgcatatgtcttaggagaacatggtgatagcgaagttgttagctggagtactgcaagcatagctggagaaacttttgaagaatatgctaaaaagttcaatttagagtgggatgatgatgtaaaatcagtaatagaaagcgatgttaagaatgcagcttatgaaataataagtagaaaaaatgcgacttattttgctgtagcattagcagtaaatacaatagtagaagctatattaagagacgaaaatactattttaactgtatcatgcttgatgcagggagagtatggaatagaagatgtttacttagcagtgccaacaattttaaatagtaagggtgttgtgagaattgtaaaccctgttctaaatgatgaagaattgaaaaaattaaaagaatcagcaagtgttctaaaaggacatatcgaaaaagttgtgaataaataattaaaattaactaaagttattgtgtaccaagcgaaatataaaaatacttgcagtatgagtaggttctaagtttactgctgaactctcgaaagggaatatatgcgtttgttctggttctctgaagattttaccgggtgattctaagaacagaagttgtgcccaaaatgctagcctcaaaagcaagttttgaactagcatatttggaacaacttctaatctaagaatcacagccagcaagatcttctaatgaacactgcacaaaaacatatattctccttctttatttagtagtaaatctaaattaaattcatatttatgcaagtatttttatgttttaagtttactgccaattaatcgaaatgaaaatcatgaatttgttccagttgctgagaattccgcaaaagcatgactttcatttctttgtttagcggaaaatttaaaataaagctatattcatgcaagtatttttataatatgtggcttaagaatttgggaatacactataagaatatattaatgagagattttattgatacactttggttatttcacacttagataacggcctaaaattaagagtatatcttattttagtatataccagaaaagaagatcatgcttttgtggatgcgttacataggggatttagctgtagatatttcttcagtagaagttgtttcattttttgcttgtcctacacttgctgtaggagcatgcagaaatgggtacaacttctgctgttagaaattcacagcaaaatcctcagtaacccgaacaaatgcatgatcttcttttcgataatatataaacttaactttaaatattgcaatatcaatctttagttcattccattaaaactaatctctccagtaattacagctttttcatttccattgctatctatgaccataaggtctccgttatcagagacagaaacacaggtaacaatttcttcattattatatgtaattagttttgcctttcgccctaaaatattggaatgatctcggcagattgagattgtctcggaaagatctaatttattgataaagttattatataatacttcgaaattatttaagaaagctgaaagtatctcacttcttttgaaatctttatcatattcaatctttagtgaagtagcaattggttttatactgtcatcaaagtcactttcatctatattaatattcatccctacgcccaaaactaaataatgaacactatccatgtcacatttcatttcagctaggatcccacaaaactttttgtcatttaaaagtatatcattaggccatttaatagttgaattaatatctaaattacttagtgttttatagacagaagcagcagcaatttgagttattttaggagcttccgttggaggaaggttaggtcttaatattaatgaaaaccaaagaccgccacttggggaaacccattttctgttaaatcgaccacttcccaaagtttgtttttctgcaattactatagtgccatggtcaatgtctttttgcgcaagctcttttgctttaatatttgtagaatctatttcatcaaagtaaactatgttttttccaatagcagatgtttttaataaaggtaaaatttcatttttatttaataagtcaggagaattaagtaatttgtaccccttattagaaatcccttctattatataaccttttaattttaagttttttatatgtttccatatagcagttcgtgaaacatttaaagtagaacttaggtattcgccagaaacataatcttgagatttttttaattcatttaaaattttatcttccatttatatatacctcctaagactaattataacataatgtgagtatttaaaagcaaaatccaagtaccaaatagaataaaatgctggaaaaatgaaattattgtaatctaattgaaaatattatataattaggtctggtgtaatttttataaatgcaactaaaatgcatttttagagaggataataaaatggatataaatagaaaaaataagaatataaataagaaatttaaggtaaaaaaaagcaagaaaagagcaaataagatttcatttaagacattagccatattttttgcatttgaattattttttactggatgtacattcccatttttacttttatatggaccatttgataatgcgaaaagccaatatgttggagcagcaatgacttcaatgagtcatcaatatctggctacatggttcttatcagataaaaaaatagcagaaattatgggagaaaactcaactgaagaaactagtgaaactaccaatatatctgatattaaagttccaaaggttaaagacgatactatagaacttcatgatatagaaaattctaagtatagtgggtattatttggtggtaaaagatccaacaagagttaaaattggagtaagttctaaattaggagttgaaggtgaaactacatcaacaattgctgaaaacaatgatgctatagctgctattaatggtggagcatttacagatcaatcatccgctgctcagtggacaggaaatggtggattggcatcaggaattgtaatgactggtggtgaagtgaaagttaatgatgtaggagataacccaacaacaacttttggtatagataaaaatggagtaatggttgttggtgaatatacagtagctaaacttaaagaacttggaattcaagaagctttaagttttggtccggcattaataattaatggaaatatggtaaagataaacggcgatggaggatatgggacagcccctaaaactgctataggacaaatgaaggatggctcaataattcttctggttatagatggaagagaaataggaagtataggagcaacactaaaggaattgcaggagattatgcatcagctaggtgcatggaatgcaatgaacttggatggtggaaaatcaacaacattgtattactatggagaagttagaaataaaccatcaaatagtatgggagaaagatctattccaacagcagttattgttaaataaacagaaggtgaggtagaattatgaagatgtttaagaagataactgcttgggcattgttatctatactattacaaatttctggcttgtatattttagaaaattttatttttaaacatacatcagaatttaaaagtaataaaatagaagttcaaaagaaagatattacaaaagatattaaggctagtattccaagtaaagctaaggatgttagcatatcatatgatggtaaatatttaatatataaattagatgaagagttatatttggaggacactgctacaggtacgagtaataaggttacaacagaaagcaaaggaactattatgtattgtgattggcttcaagaaagagacatattagtaatagctgagaaagccaaaaaagaaggagaatctaaagttcagattgtaacttataatgtaaaaaattcaacagagtctttagttaaagaaatatgctcagctgaagatgatatggaagttagtaagataagtgcatctacatttacaaatgtgtattatgtagatatctataaaggtggattaaagagtatagtttatagaattgatataaataatgatatgagtaaagtgcaacttaagactaatgtcttaggaaatatgcaagtagttccacacaatgatagattaatatatgaagataagttaaatagtaaattctttgttacaagccctaataagccattaacattcaatactaataaaaatctaacacttcttggaattgatagaaatgatgtaatttatattggggagcttaatggtgataaaattaccaatatcacttacggaaaagttgatgaagatacagcaaattggaaaaaggcaacacttgattcggttgtaagtgctaatgacttgtattttagtaataaaagtgaaatactagttaatgataatcttaaaggtagtgtcaagaatttaagtacaggaaaagaagttgaatatgagggaaaactcgttcagattaaagaagattttatagctacggaagataatagcgggaaattactttataaaagtttaaaggataaataaagttggcaaataaagagtgtttaattaagttggaattaaacactctttattaaattagatcttataatatatatgtggcaactgagcttctaccttttgtattaattaggcatttggtttactaaaatttaaaatgcaagtttattagcacagcgggcacaggataatgttgtaatctaaacgaataagtgcatttacattgttgagattaatcttttatgatataatgttgggaataaatagtaagcaatctatacattttatataaacacttaaggcactataaatagtgtaaggaagataaaaaatatatatacctaaaaagtttaatttataaaagtttatcctaaactattaggtggcaaaaatgaataagtctataagaacagaataatattatttagttgaaatatatatgttcttttaataggatttgttctaagtatgatataatataaaacatacatatcgaaaaaggaggaaaacatgaattcagtacttaatatgattttaatgattccagggatgctcatagcctttacatttcatgaatatgctcatgcattagtagcggataaaatgggagataagacaccgaggtttcaaggaagattaactttaaatccaattgcgcatattgatccaataggatttatagcagttcttatctttagctttggatgggcaaagccagtacaaactaatccatcagcttataaaaattattataaggatgatttaaaagtaagcttagcaggtccggttgcaaattttattgttgctatagcagcagcattaattttgggagtttatgtgagatttatatatggaattctaccaacagcattagctggggtgctatattcaatgatattattaacgattgtagttaatgtaaatataggattgtttaatttaataccaataccaggattagatggatttagccttttaagagatttaaaaccaaatactttctacagatatgaagaaaagttctatcaataccaaatgcttattatgttagcgttaatatttgttggtggaaaaataatacacataccagcacaattaatcataaatgcattattaaaaattgctatttaatttgagatattctgtaatatatatgttgcaaaactaattccccatcataatcctaaaagcattgtaagaattttagccgtgattgtaaattgtgaaatgtgcattatggattatgcactgtgaattgcaacatatatataataaatgtatcgtagcatatattaaaatttagttgacaaaatttaagataatttgtataatttattatcattaatattgaaaaattctaagaagaggaaagtagtttaattaattcctatagcgaatagggagttggtgtaagccctatggatagattataacgaagagagccttggagaaaccacctgaaataagtagttaaaaagataataatctaatatagctggtatgatatattaattattatttttaaacctttagtagggttggtcgcaagttaaattgcgttaaaagttgagaggtattttatttatataaaatacaataagagtggtaccgcggataattcgtctctttttatttaagaggcggattttttttgttctttagaaatctatatcgaagttaaatttgtgcaagtattatgagaaatactgactaagaagattaaattttgagaaagaataaagaaatacattcctataaattaaaaaattatttaatttatgaggagtttgtctaaatataaggaggatattatggattataaaagtaaagttgcagaactaataaaaaaacatgtagaactagaaattgaagctattgaaaaattaattgaaataccgccaaagccagaaatgggggattatgcatttccatgtttccaattgtcaaaggttatgagaaaagcacctaatatgatagcagaagaattaaaaaacaatatgtctaatgagggatttgaaagaattgaaaatttaggaccatatgttaacttcttcgttgataaaggagtatttgcagaaaatacaatcaaaaaggttttagaagatggagagaattatggagcatcaaatgtaggagaagggaaaacagtctgcgttgaatactcttcacctaatatagcaaagcctttccatgttggtcacttattcactacagctataggtaattctttatacaagatgtttaaaaaggaaggatataatactgtaggattgaatcacttaggagattgggggactcaatttggtaagcttataagtgcgtatgatagatgggtagacgaagaggcattagaaaaggctccgattgatgaattacttagaatatatgttaaattccacgaagaggctgaaaaagatccttcattagaagatgaagcaagagcaaactttaaagcgttagagactggtgatgaaaaagcaacagctctttggactagatttagagatttaagtttaaaagaatttgaaagagtttataacattttaggagttaaatttgattcattagctggagaagcattttataatgataaaatggatgttgttgttaatgaattgaaagaaaaaggacttcttgtagaaagtaatggagctcaagttgtaatgcttgaagaatataatatgccaccttgtatagtattaaaaggtgatggtgcatcaatatatgctacaagagatttagcagctgctatgtatagaaagaaaacttatgattttcataaatgtgtttatgtagttggaactccacaagcacttcacttcaaacaagtatttaaagtgttagaacttgcaggacatgagtgggctaaggattgcgttcatgtaggttttggattagttaagttcgcagatagaaaactttcaactagaaatggatcgattgttttacttgatgatttacttcgtgaagctgtagagaagacaatggaagttataaatgaaaaaaatccagaacttgaaaataaagaagaagttgcaaagaaaatcggtgttggagcagtaatttttacttaccttaaaaactcaagagaaaaagatattgtttttgattggaaagaaatattatcatttgatggagaaactggcccatatgttcaatattcatatgcaagaggaaatagtatattaaacagaggtaaagaatgcactggaactgttgactatagtaaattatcttcaaaagaagaatttgagttagttaagagcatagctaactttaatagcgtaataactttagcgttagataagttggagccttcaatattaacaagatacgtaattgaagttgcaaaaggatttaataaattctataatgcacattcagtattgaacttagaagatgaggatttaaaagctacaagattaaacttagttaaagcaagtttacaagtaataaaaaatggattagagttacttggaatagatgtagtagaaaaaatgtagttaattaatattaaatttattataattttttgaaatagagggatgtcttatgtagcaaccctctatttttgactcgttaatttcttttatatgccttaaaaaagtgatatatggtataattgaaaaaagcatggaaaggatgtgggattaattgtttataaatagaaatattaagtatagggatatattaatatttgctttaataggtgtaattggatataaacttatagataattataattttttctttgatataggcagaaaagttttatctattatgtcaccttttatatatgctattatttgtgcttatatattaaatccagtagtaagtttttttgagaataattttaaaactaaaagagcaatatcaatattgattacatattttataattatagctttaattattataatattattttttacaataccaagtatagtagacagtatagtaaatataactaaagaaatgccggcctatgtggaaattatacaaaagtggatcaatactcttcttcaaaatgaaagaataaagacactgattgtacaagcaggacttttaaataagttacaagaaatgtcaagccagataggaagcgtaacaatagggctactacaaaattttattatgtacttattatcatttacatcaaatttagtaagtgtgatttttggttttttaatttcaatttatgtgttagtggataaagaaaagttgttaaaacgtgctagaaccataacatatatgatttttaatgaagaaaaggggaataagttaattacatttattagaacctataataaaatgataggagtttatataggtataaaggcaattgattctgcaataataggtcttatatcacttataggtttattaattgttggagaaccatatgcaccactaatagcgctgatagaagggattactaatatgattccttattttggaccactcattggtgaactagtcggtgctggagttgcaatctttgtttcgcctatgaaggcttttatggtgtttatacttttactttgtattcatctttttgatgcttggtatcttgatcccaagcttataggaaaaaaggttggagtcagcccattagggataatattaggagttgcaataggcggtggtttttggggaccttttggaatgcttcttgggtcacctacaatggcaaccataaaaatatattatgagaaaacagtggaggagtttaaaaaaaggaatccaggattagttaagaaagaaagtcttggagaaattgatttataaaagattataaagaatttaggagaagttttatgaaggaatttattgatttattaaatgaacgtcaaagttgtagaaagtatttaaataaacccgttgaaaaagaaaagttagtaaaatgtattgaggctgcaagattagctccatcagcatgtaacagccaaccatggcattttgtagtagtgaataataaagagctagtgcctaaggtttcagaatgcttacaggatgcagttatgaataaatttactacagaatgtccagcttttataatagtggtggaggaaagtggaaatttaacttcacgtgctggagcactaattaaacagcaggattatagatctgttgatattgggattgcaactgagcatatatgtttagcggcaacagaacaaaatttaggtacgtgtattttaggttggtttaatgaaaaagaactaaaaaaacttttaaatataaataaattaaagcgaattagactagtagtggctgttggatatccagaaaatgataatataagaaaaaaagtgcgaaagaatatagatgaaattctaacttttatagaatagtcatggataaattttaacgacactatcaataataaatatatttggtagtgtttttacttatacaatttatagtatatattgcaaaaataattctttaatcataattccaaaaatattgcaagaatttcagtcatgattctgaatggtgaaatgtgtattgtgaattgcaacatatatatttaaattaagcagatagattttataagcttttctgaaatgaaaaaataaagtataataaataagtataaaaggatgtgagttaatggcaaatataggtgcattttttgatttagatggaactttatacagagaaggactaataacagaagtatttaaaaagatggttaaatatgaaattataggttcagaaagatggtataatgatttaaggccttactttatgaagtgggataagaggcaaggcgattatgatcaatatctgttgaaaatgattgatatatatgttgagtcaattaaaggattacagaagtatcaaatggaatatatagctaagaaagttgtagaacaaaagggcgatagagtatatacttttacgagggacagaataaagtggcatcaagctaataaccatactctaattataatatctggatcgccttcagaacttgttggagagatggccaagaaatatggctttacagattatataggtgcaaaatatattatagatgataaaaatgtatatacagggcaagttacaccaatgtgggatagtaaaagtaaatcgaaggcgataaatgaatttgttaaaaagtatgatatagatttaaacgatagttatgcatatggagatacagcaggcgattatactatgtttaaaaatgtaaaacatccttattgtatgaatccaactaaggaacttttgcaaaaagtattgaaagatcgagaattaataaaaagagtgaatgttgttgttgaaagaaaggatgtaatatacaatttggacattgaggatatacaattcttatagaaaagagtgatactgtgattattcgtgaaaataaggtgaaggttgaagaatatagtgaagaatttatgatgaagtctcaagataaagaatatacaccagaagaaattatcttctttgatttagagcattatgtatataagaagcctaagtgtattggagtatttggggcgtgtgagtatgataagaaaaataataatattctagtaacccaatatatgattgaagatagagatgaggcgacacatatactgtatctcgctaaagaatattttataaagatgaaacaaaaaggaaaaaaggccattatcactttttcagggaataatgatttttcagttattaattatcttttcaaagaaaataatatatattataattttagtgaagaatttgattcgattgatatccaaaaggaatatgaaaagaataaaaaattgtctattgggcttaaaaagttagagaaagtttttgatattgtaagagagggagaggtaatcagcggatctaatctagctaaaacttttcacaaagttatgaaagataaaagctatttcaaaagaatgccagaagagaaaatagaaaaaattcttctttataatgagcaggatgttataaatttatattatatatatgtaaactggaaaaaatatatttatgaagatattgaagatattgaagatattatcgaagaagctatcgctgaagatgaagttgaagatttagaaaatctagaagaagagtatgatattcaagaaaattcattgaataataattctaattaatgactgcaaaataaataagatagaaataaataatttagaaataattaaatttatttctgatttttaaatgactccaagtttttggggtctattttaatgcgttaagaacagctaggatgcttttaatataatgaagcatcctttcttatgttgatttatttttttgatatgttagagccgtctgagcaaatgacgatggttccatctttatctgttctataggtttttatattgttttcatctaataattttgtagtaatagcgtcaggatgattgtatatattgtctttacctacagatataactgctattgaaggattaactttttttagaaagtctttactagtagaagttgaggatccgtgatgtcccactttaagcacatctgcactgatatcttcattattattaagaatttctttttctacttccttttcggcgtcaccagtaaataaaaaagaagtgttaccatattgaatttttattacaggagagtagttgtttaaattatcataaaaatccttattaggagaaaagacatttactttagtattttcacctaagtcaatagaagtactattgtttttcaatacatgtacttttaaatttttatcttttaaagcatctaccatgtcctcaaagctttttgtagtagattcaacttttggagcatagaaagttcctatactataagtttttattatatcatccatattaccaatatgatcttcatgtggatgagttgcaattacataatctaatttatttaagtttagccctgataaatagttaaagagttttcttctatcagatttaggtccagaatctattaaaagatttttgttatttacttgaacgagaatgcaatcaccttggcctacatctatatagtgaacaagcatcttgtttggatcagcgttactggctttatttgaattgaattttgtaaggccgcaacttactatggaaaatgaaaataatagaattgcaagaaaagttagtaaatatttttttacattatatttatttttgttcataaaaaagttgtctccttgattacatagttttaatataattctaccatttaaggaaatgtaacggaaatgaaattgttctaaatgtaagcaaaagaaaaataaaaagttggaataaaacacgaacaaatttgtgaaaaggcaatataatattcatataatgagctttctgagcttttttatagcatagtcagataggagtggaggaactaactttattgaattttaatttaaggaatttcttatgaactcaagtaatttttagatgaaaaaatctttaaaatgaaaaatgcaaaggttgaatattgcaaaaagtgtgatataattatttcaatatgtggaatttgaaataaaaaatgcaatatttaaatatgaaaaaattcatatggggggccaggaaatgaagaaagaattttctatgagtaatgacaaagtgatgataaactttacagcaaagtactgtaatagctttgaggctatactagaaagtgatggatttagacgaattttagaagtttatctaagaagagctaaaaagaaaaattcagtagcatacagatatttaagtaagacattagatacagatagtcttatagacattagaagagatttaactgtagtaataaaatatttaacagttatgagtgttgaggaaattgtagagattagtgactcatattcaaaattattagaggatagggacaagtttgtagtatttatagaagatttctatttattttggagaaaacttgaaagatatacaatagttcatagatataaggttcaacaaggccttgctgcagttagttttacagaagcaaatgctaacttttctacattaattctaagtttgtacagaaaaattgaacagcatgttgcaggatatcagccaaaagtttatagacaaataccagctggtggaaatgcctgcataatgattcatgaaatggaatgggtaagaccaaatggatatgaagctttagaggaagtaccatttattgatcatatacttttagaaacaccatttataacttatcctaaaaagaatacaagagatggaatgtttacagagataaaatataatccattaaagtatgcacaaataaataaagaacattggttttgttatccagctaagataggcgggttacttactttcatttatttccatagagattttatggagcatggaataactttatgtaatctgttcgagatggctagaagtgaagaaacaaggggaagaaagcctgatattatttatgtatttggagctaaagataacgatgaagacctaaaaactgtgttctttgatgatgttcaaaatgatataatgcttggatatgtgaatcattcagaaaagatagattattttggttatataaagaagatgacattaacattatacaacttaataatgataaagagaggatatttaccgatacatggttcgatggtaaatattattttaaaaagcggagatgaagctaacgttgttatcatgggagatagtggagcaggtaaatctgaaagtttagaagcttttcgtagtttaagcgaagattatatttcagatatgactattatctttgatgatatgggaacttttaaaatagaggatggattaattaagggatatggaactgagattggtgcatttgtccgattagatgatttagatcaaggatatgcctttaaagaaatggatagaagtatatttatgaatcctgataaggtaaacgctagacttgttgtaccagtagcatcatataaggaaataacaaagggacatccaatagactttttcttctatgctaataactatgatggcgttaatgaaggagaaaaatatttagattactttaaaactccagaggaagccattaaagtatttaaagcaggtgctagaatggcgaagggaacaacaacagagaagggcttagtagaatcattttttgcaaacccatttgggccagcgcaaaagcaggatgaaacaaatattctgatagaaaaatattttaagacaatgtttaaaaatggacaagtaaaagttggacaaattagaacttgtttaggtgtaaaagggcaagaaaaaaatggaccaagaaatgcagctatagaattattcgatgagattaaaaatatgaaataaatattaagagattaaggtaaagcatttaccttaatctctttttaatttatttcttaaagccttaaaaatatttaaagatctataagaaatgcttgaaaagttttgtcttgattgtctattatataaattcatttttagcttactaaaaaatgattcaaagtgtctaattctaccaacagctttttcttttgtgaaattcaataatgaacttggtttatcaaataaaaaattagctggcacaaattgaaatgcaaaagacattttttcaaattgcattaaagaagctatagttaaactaaaatcaataagataataaataataataaagaaaataaatacctcaccaagtgttttgggaatattattgactatgtttaccactataggatgtattatcttaattatgcctacctcaccaactccccagagtagagaataaagtaaacaaacacgaccatgtatattaaatggatcgtcggtataatcccaccactttgtcttaaatgctttttctaatacaaaaccagtaatatattctaagactgttgtaaagaaacaggctaagaagaataaggcgaaaatattatttttgtagttatcaagaaagactacaagaaataagacaccgaatccatatataggacaaaagggaccatataaaaatcctctattaacaaacctacgttcatttttaaaataatacaagacttcgaggcaccagccagcaaatgaatagaatacaaaaaaatatattaaattataaaaattaaaatttaatactgtacgcaaatgtatactaacctcctagtaaaatataagtattaataatttattccattatatatcaaaacatagctaaagaaatattaattttacattaaaaatttcttatcactatgtataagtcttaaatacaaataaatattatattgagattagcagcgatagaattagcgtttaagtcgtttttattttaacaaatataatattaatatttattatgctgcattatactctagatctttcttgaacgaaaaaagagatagaatatagactagcaattccaactaaacaataaattattgtagataacattgaaaaacttccaaaaaggaaatctactaagttaaatctaaaaaaacctattaagccccaattaatgccgcctataattataagggcaagtgaaattgaatttaaaattttcataaaaaacacactccttattataagatacctttagtatgcatataaaaatgtgtttttattctattttttataattattctaatgatatgtttctgtctataggttgagatagagaaataaatgtgtcagttctttggactccatcaatgttatttatcttgttaagtaaaacattctgtaaatctaaaatattagcacatacaactttagcaaacatagaataatcaccagtagttaaatgcaattcaactacttcctttatgtttgacatttggtcaaatacatagttaaaagaagatgttttatcaacatagatacctacaaaacaacatacatcgtatcctagtttaggtagatttaatattattctagaaccctttattattcctagatcctccatttttttcattcttacatggatagtaccaccacttacatggcatattctagcgatttctaagtaaggagttctacaatcttttattaacaagtcaagtatttgtaaatctaattcatctaaatgattatttgaaattaaattcattatatcacctcatatcttttatatcatatactttttttattttatcaaatatgcgcgaataattaaagataaaactataaatttgttaaaaaaaaattataatattgatattttaataaaatttattactttttgattataatgtatactgatgaaatcaacaccaattaaaaggaatgcttgctaatagtttatatataaattatcatataaccatatagacttttttataggaggatatgtgagtagatgaatctttttacatcaattattttatttgtaataatgcttcttgttatatttgtagcttatgcactatgcaaaaaatttatatttggtaaagtgcgtataaataagtggatacctttagcaatagcagcagtgttatttgcagcccaaatattcgtaggtcaatcaaatacttatatttcaagtggattatctatttttgcagttctatttttcttatggttcatggatattacacaaagaggcggacttaagaaaaaagaaaagcaaatagtgattaagccaaaagctaaaccaaatagagttaaaaaaaataaatagaaacatagaaaagaaatagaatgtatgattaataacaatgtaaatgttttgaaattatatattctatttctttttatatgaattatttttttagaaatatatatacgttgcaaaaaaaatcttcatcataattctaaaaacagtgcaagaattttggccgtaattgcgaattgtgcattgagaattgcaacatatatatttaagtatataaaaaatattattcttgacctctaaaaatgggagagctaatagcgattttgttattgtccagtgttatctttattacataccacgcctcagtttttaggggctcgtgagaatacaagtattttactttatttaaattcaagttagatactttttttattatagtcccacctgtagatattatatcaatttctaatattttgtgattaggatcatgagcaaaaattgaaaattgtaaattatcatcttccataggtattatatcgcccatgaattcattatttattgtaaagtacatagttaaagttctagattctgttgaataagtgcgtcgttttctaaaagcatcgactagagactgagttgtaagttcttctgcaattatacatgttaaattttcatcgtcaccaaagtttaatctatgattatcctgaccattgattgcacctagtttccagtttttatcgagtaaatggtaataatatttttcatatcttaaatacttgtttggataagatccatttccaacttctattgaagttattagtttatttaaaatagagttgtattctaaatatgttattgttttgtgaggatggttaattgaaataaatgcattaggattattaagcatccataaaactagtaattgcatattatttactgttccagtaaagaacctgtttggatttactacattaatgtctccaaatggattagttttgctttcaaaaccaaccacagctaaaaagttttcatgttttttattataacgagcggttaaatattttagcgcatcccatctgcttagctcagagctttttacttttattgtctttgttaaatgattattatggtctgttaagataaggaagttaaggccattatgtcgtgcataatcaaatgcttcaattggagttccatgtccagtggaaaaattgcaatgagcatgaggaattccatagtaaaaattcagatcatctatattaagcttatttttaggtgatttttttttgcccaaagttattacctctaaaaattatttatagtatatattattaaataagttattaaaataatgacaataacataaaagtaatgataaaataactttagtatttgatgaggtggtaattattgataaaaagttttaaagataaagaaccaaatttagaaggcgaattatatatttcagaaacagcagtgataattggtgatgtaactattaagaagaatgcaaatatatggtttggtgctgttataagaggtgatgaagcatcaataactataggagaaaatacaaacatccaagaaaattgtgtggtacatgttgattatggatataatgcagttataggagattgttgtactatagggcatggcgcaataatccatggatgcaccattaaaaataatgttttagtaggcatgggatcaataatattaaatggagcaaaaataggcaataatacaattataggagcaggaagtttaataactcaaaataaagaatttgaagatggcgttttgatacttggaaatccagcaaaagtgatacgaaagttaacacaagaagaaattgaaggaattaagaaatcatatataagttatctggaattgagtaaagatttcaagtaatttagatttaacatgttttgtataaagaaaagatacaagttattatcagattgtgtagtaataaatttacattcaaggttctagtaatgttagtacccaattgatgatagcaatgtataaagttaatttcaatatatagaagactcaagaaaagtaataaagaaggtaacatcgattaaggtgttatgactaatggaggaaattaaaaatgatatcagtagggcaatatagtaaattaaaagtaagtaagaaagtagattttggatattatcttgaagataattttggtgatgaggtcttacttccaaacagtgcggcaaaaggacatgaaataaaagaaggcgaccaattagaagtattcatttatagagattcaaaggataggatgatttcaactctaaaaaaaccattattaacagttggagagattggttatctagaagttgtaagccagaataacattggggcatttgtaaactttgggcttgaaagagacttattcgtcccattaaaagagcaaagttacaagcttaaagaaggaaaaaaatatctattttatatgtatgtagataaaactgatagattagcggcaactactagaatacactcttatttagatatagcagaagaaggtaaatataaagtttctgatgaagtaaatgctatagtttatgaaataaatgagaatgcgaccttaaatgttgcaatagatggtgaatatagaggattaatactagctaatgaacattttgagtacatatatcctggacaagaaataaagggaagagttaagagaatttatgaagatggaactattggagttacaacaagaaagaaaaggttagaagcaagaagtgaattaagtgaaacaatacttaattatttaaaagcaaatggtggatttatgccttataatgataaatcatcgcctgaagatataaaaagagaatttaatacaagcaaaaattatttcaaaatgactttaggcggattaatgagagaaaaactaattacacaggataaagagggaactagacttttataagtgacaaattaaaagtgacaagtgaaaatttataaattaaaagtgataagttttatgttaacttatcactttttcacatggcttattgtacatcgtttgatattcttgttctgaataataaatttttaagagctttccagttaaatggtattaaaggataaaaatatttatcaccagctattgttttcgtacttcccataactactagaatgaatataataccacctaaaaagccccagaaaccaaagaagccacaaagtacaagtaaaatcattcttgcaaattttaaagcaaaattcatttctatgctaggttgagtaaagtcccctatggtaacaatggacatatataatatagactgaggaataaaccagcctgtttttacagcataatcaccaaggattaaaccaccaatcagagacattgcacttccaagtgggcttggtgtatttaaaccggccagttttaatatatcaacagcaaattctaaaagcataaattgtccgagcagaggtaaagcaaattcttcttgcggtttcaagaagtcaaaataactcggtataaaaatattaccatttacaatcatcaaatagactggagttaataatatggtcgctaacattacgaaattcctaacaagtcttaagtaatttccagtgaatagtgggaagtaataatcatttacatcttgtaaaaaatcaagaattccagttggaagaattattacgtttggagaattatccacaataataactattttaccttcaactatatgtgcagctgccacatcgggtctttctgtaaatcttacctttggaaaaggattaagccaattttttgtacacattacatcaactaagctttggtcagaaagcgttaaggcttttatatttacttttgatatgctatcaacgattaaattaagagcttttttatttgctactccatctatatatgcaatacatacatctgtttttgagacatcaccaacttggtgtatatcaaaaactagtcttggatctcttattcttcttctaatgaaaccagcattgaatactaatttttcaatgaagccgtctcttccgcctcttaaagttttttccttttcaggttttgatgaatctgagccaggataagtacgcaagtctaatagaataaatgaatcataaccatcaatatacattattgtttggccagataataatgcgattaaaattttgtctaaatcagtttcagttttaacagatacgtgggaaactttattattgataaagtcatcaattgttttgtatgaattcattgtttcaggtgttatcttaaagaaagattttaatatttcctccatgatagcatctttaataaaaccattcaaaaaatataaaacagagcttcttcccccaacaacaaattttcgttcaacgatatcgaaacttttatctacaactaaatttgaatgaattaagtcaatatttgcttggtaattgtttgcaacattcaattattttaccttctctctctatttaaatatacatatctagtatgttacagataagaaatagtattcatgtttatcaaatatataagttgataattctttatagcatttttagatggagaagctttttgtatgctatttcacttttataggtgatgtactttttataaataggaaaagtttcttaggggacagcgcacttttttgtgcgtaaagtttttaactgtacttgataagctcgcaattgtggttcacgctttttttagatatgaaatgatattggttgaactttgtgcttttttagaggtgaaatgatcataattgtgcctcggcactttgagtactttttataaatgcgtaaagatcatgattgtacttgataagttcctaattgtgcttcgcgcgcgctttaatttttaaatgatcctaattgcacttcatgctctttttaaccgtgaaatgatcttaattgcacttcgtgctctctttaactgtgcgtacttttttttaggtaaaaagatcttaatgtgctatggcactttttcaaatgtgtaaagatcttaatgtgctgtcgcactttttttaaaggtgcatattttaatagtatcaatactattagaaggtgaaatgaatgtgcggaattgctggattagtaaattttaaaaagaatatagtacaagataaagatatattaaataatatgataaagactttggagaagaggggacctgatgcaaaaggatattatatatctccaaatgttttattaggccatagaaggcttatagttgtagatccagaaggtggattgcaacctatgactaaaatatttgagggtaaaaaatacacattagtttataatggtgagctatataatactgaggatttaagaaaagaattaaaggctaaaggatttacttttgattcttattcagatactgaagtattgcttacatcgtatatttgttgggggaaggactgcgtcaataagcttataggtatatttgcatttggagtttttgatgaagataaaagagaagtttttttagctagagatcaaatgggggttaagccattattctacactgttcatgataatacccttgtttttggttctgagataaaaactcttttagcagatccaagagttaaaagagaaattgatatggaaggattaactgaaatatttggacttggacctgcgacaataccaggaagcggagtatttaagaatataaaagaaattgcaccagccaactgtttattagtttcaggtgatggaaatattaaaaagtgggaatattggacagttgaagcaaaagaatttcatgaaacagcagaagaagcaatagttcatgcgagagaattattaatagatgcagtaaagagacaattagttggagatgtgcctgtttgtacattcctatcaggagggctagattcttcaattatatcagcaatagctgctgaggaatttagaaaacagggaaagaagcttactacttatgctattaattatgaagataatgaaaagtattttaaagcatcattatttcaaccgacatcagatgaatactggtcagaagaaatggcaaaatttataaatagtgatcatagaaaagtagttttgaatcattcagatttagcagctgcattaagagatgctgtaatatcaagagacttaccaggtatggcagatattgattcgtcgatgcttctattttgtaaagaaattcgtaaagactttgtagttggacttacaggagagtgtgctgatgaaatctttgggggatatccttggtttacaagggatgaaatgttctatttagatacattcccatggtcatgcttgtcttactaaatgacgatattttgggagaaggtggcagaatggagattatttttttttagaatcatccattcctaaaatttttatattagcagtatactctttaccatcccataagacttttgaagcaacagtctgaactaataatcttttttgattaggatcatctaaaatatcaatgttagcattaaatttctttaatgcatctataactaattctatattagaaacttgagtatttatttctgttttatctgattcaatattatttactgaattttgcaattctttaatttcatcatttaaagatttcaattcatctctaaacatatcagaaatactatcatctttttcaaccgaaattcttttaacaagatttttagctgcttgttgttttccttcaatttcagtattaagtttcctgatttgttcactttcaaaatctgtatcaactttagcgatattttcattaagtccttgaattagtaaatcctcattgtaacttttcatttctgataaaactatgttatctaatctatcaactcggatattaggattatcacatttatcagtaaatctatttttcttattagaacatatataatagtcatattttatatcaggattattctttgatggatggccatgcttaactatcatattagctccacaatgagcacattttaatattcctgataaaatagcattattgctagcaccagttcctaaacgaatggtctgttttactttattttgatccattatattttgaactttaatccagtcagcagcatcaataattcctttatgttggccaacagcagcaatccattcagttatatcacgatctacaattatttttttagttttattatatgttaagtatccatttccattaggagtaccaaatacattaattccagtgttttttaaatgttcatggcttaaagaattagatttaatatataccggatttttaagtattttagaaatttgggagctttttagatcaccaccatttttacctttaataccactaaggcttaatttttttgcaacatgagttattgattgtttaataagatacgtattaaatattaactttactaattctagttcttcttgatttggaattagtctcattaatgttctttctttaaattcatcatctaagtatgatgttttttcagattcaaatccaagaggaacttgtcctcctaaccagcgaccagtttttgctaattgaagcatattatctcttacacgctccgctatagtttcacgttctaactgtgcaaatacagatgaaatatataccatagctcttcccatcggagtacttgtatcaaattgctctttgattgatataaaatcaatattattagattgtaaaagctctagagttgctgaaaagtcagcaacatttctagatatacgatctagtcgataacatattaatgcatcaaatttctttactctggcatctttcaaaagttgtttaaattcaggtctgttaatatttccaccactgaatccttcatcctcataaactataaactcaattttttcatttatataatttcttgtacaatattctttgcataattctatttgattttctatagattcaccttttccagtaaatattgattttctactatagattgctactttcatttgtttcacctcatttttaagtataaaacatttatattaattggttaacttgtacattataccaaaagacttaatttgtaactgtgatagatctttactcttatccaacattatattttttaaattatattataaagaatccccatgtagatgaggattctatagtaaatatttagggtaggtgctcattggctctctactgatcaattttattccaaataatttattttaattttaatttcaataattctataggtacgtgtagttgtgcggctatttgttcaatagtcataccactaaatttatcactatataaattttcatcacttaaatataagttcgctgaaaaataatttgcttcattttcatatttatttttaataatatgagtatttttttctaagaataatatattcagtttactatgaaaaagagcatgtcctaattcatgcgagcatgtgaaatatcttgaatattcatttaaatttatatttatgtgaattactttattacgtggagcagcttgataaaatccatttatatttttaccaagattctcatataatatttcgattccaagattttcacaaagttcaaacggattctttgtgtgatatttcatctttagttgagtgacttttttatctataatttttttcaaatagcatacccccaattattgaccattaccctctataatgttattttctatattttttaggtgtatattttttcttatttactttttttgcatattcaagtccattttggatagcagcttttattaattcaaaatcttcatcgtctataagctctcctgatagcatcaaaccatcttgttgttctaacatttcaagagttttagctaaagttttttctatatctttttcatctttttcagttaattgtggctgccattcttttgtaggaggttttaaattatcagttctacctaataaataatcaacagatacttcaaaaaagtcagccatatcttgaagtaatttattttcaggtgtattaacaccattttcatatttagatattgcactttttgttataaagaatctctcagctaatttttcttgagtaattcttttatcttttctaagttttttcaatctatctgcaaaagttgccattaaatcacctccattaattatattataggtaaagttgattagaaataaataaaggttgactaattagaaactttttttataaaaccacttgacagttgattacaaatcaactatatttattgtatcaggttgattacaagtcgacttttgagaaaagaggtgatgaaatgaatattacagaatttaaagttgaaatgctaagaaataaagtcaaccgaacaaaattagcagaagaactaaatataagcaagagtgctttaagtaaaaaaataaatggagttaacgagtttagtagaaaggatatttctatatgtaaaaaagttttaaatttaactccgcaaagagtggacgaaattttttttaatagtaatgttgatttaaaatcaacaaattctattcaaacttagtttgtccgaagtagtaaaaataatgtcatgaaaggagcggaaagtatggataattatgaggcaattgcttatgcaaaagttgcagtaaacgagttaaggaagaatggaaaagaaataaccgaaagatcaatacaacgtgaaatgatctatcagatggatatgaattctgaaagtgagatattgaagaaagtagaaaaaattaaatagtaaaatgcattgggaatgagaggacattaaacaaaacggaggaatggaaatgaacgatttaagatgtccaaaatgtaacaaattaattctcaaatataaattaaacggtgtatttgatgttgaatttaaatgtccacgatgtgacaaaatttcagtaaccaaattaagccaacatgaataatataaattgaattttttatgaaggtgattaaatggccaaggaaataagggtgattatagaagggactataacagatgatttgaaaaagaattttaataataggttagcaatagcattgatagcacaatatggtgtagatggagcaaagcttattcttgaaggtttaaagaaagaaggatagatatgaaagaagggtatttataacataattctcagggaagatatgaaattcctaatgtaacttattttacaagcggagagccagttcaaattttagtagatgatatttggactaatggaagaatggagttttcacattcagatggtgattattactttatagctgatgatggaacagaagtacatggattgactggaattaaagccagggaattaaattaaatacttatgataattgggcagagatgccttttaaaaaatcttttttatccaaaaaaagaaaacactttctcactatattatatgcaggcaattaaatattagtaccaggaggaatgaaaattgaaaagcttcattatcatatttaaagcaaatgaagcaaaagaagaaattttaaagaagattgatggtgcacttaagaaggttgaagagagggaaaactatgaagttaggtgatagtattaatatccaaaaagaggcttttaagattatcaaagagtataatgatgcatttctattaattagtgaatcaggatttaatcttaaaacaataccaaaacttcaagtaattacttcaagtaattaaatgaaaaggcatacttgagaggagtgatgtgaagaaaaatatagagctaattttgaaaaattaaaattgaataatcgggaggcgtaatatgaatacagtaaaaattaaaaagttaatccttaagaatttcaagggcattaagaaattagagattgactttaagaaagtaactaatattttaggagaaaatgcaaccggaaagacaaccatatttgatagtttttgctggctactcttcggaaaggatagtaaagaccgaaaggactttgaaatcaaaacattatcacctactggagaagcacttcatggattggagcatagtgtagaagcaatattagagataaatggtgaagaggttacactacaaagaatttatactgagaaatggactaagaaaaaggggcttgccgataaagtattttcagggcacgaaactacttattatatcaatcaagtcccagctaaacaaaaagaatataacgaaaaagtcgctgaaatattacctgatagcacctttaagttaatatccaatcctctatattttaacaatctggagtggaaaaagcaaagggaaatattgttacaaataataggggatatagatcaggaaaatgttattaaccataaagatagtttaaggccattacaaactttgttagaagggaatacaacagtagaagatttcaggaaaaaaataaaagctcaaattgcaaagtataccaaagataaagagtctataccttatcgaattgatgagtgcaatgaaaacattgttgaagaagatttttcaatattggaaggccgaaaaatgacggttgaaaatggaattgaagcattggataagcagcttttaaatgatggtcaaggaaatactcaaaaggtagatttacagaataaaatttatgaattaaataaagagcttcaggatgaatcaataaaggacagagaaaaagctaatgaacctttgcaaataattcaacaagatataagggacacaaaaagtaagattcaagacttggattggaaattgaaaaataaaaatgtagatcattctcatttggctcaagaaaatcttagagttgaggaaaacattaaagctaaattagagaaacaggattcattgagagatgagtttaagacagaaaaggctaaagtttttgaatttgatgaaagtcaaacatgctgcccacattgtggcagagcttacgaagctgaaaagattgaggagcttaaagaaaaagctcaaaaccactttgaagaaactaagaaaaagattcttgcttcaataaattcaaatgggaagagattgggttctgagattgaagaattaaggcaaaaacaagcagagaacattgagaaattagcagcttttgaaacaagtattaaagaattaacatcccaacgagaagaagtagatatcaaacttaaagaactagaagatgctgcagatgaaattaaaaatatgccaactgctgaaaatcctaaaatagccgagttaactgctaaaattcaaaaattaaaaaccgaagtggctacatgtatagcaccagataatactgaattgattaagagaaaacaattattacagggagatttagaaactataaacagaaggttagcggctaaggataataatgaatctctaagaaacagagttctaatacttcaggatgaagagagaagattagcggaagagattgctaaattagagggatatgacttcatgtgtgaagagttcataagaacaaaggttgaattgttggaagaaagaatcaattcaaaattcaagacagtaagatttaaattatttaagcaacaaataaatggtggaattgatgaatgctgcgaaacacttataaatggagttccatactctaatgcaaatacagcaagccaaataaatagtggaattgaaattataaatacactttcagaacactataaattccaagtacctatattcatagataaccgagaaagtgtcaatgaaatattagatacagagagccaaattataaacttgatagttagcaaggataagaaattaagagttgaggtgaatgagtaatggctaaattaaatgttgaattaaatataggctggttggatgaagaagaaagtcttgatgaagctattaaagaacaacttattaatcagatatcaaatagagtagcttcaaaaatagagaagcaaatagaaaacaacgcaataaagcaggtaactgcaagaatttcagaatcgattgatgaaaaggttaattctattacagaaaatttattgaataagaatatcactctttatgataaatggggtgatgtagtcgaaaaggatgtaaatattcttgaaatgtttaaaagaaaaatggataactttctaacagaaaaagttgattcgagtggaaaaacaagtggatatggtcgtgaaaatacaagattagaatacttaatcaataaaaatatttcttatgatatggaaagaaaagtagagtatgcagcagccgaagtcggtaaaaaactcaaagaatatgttaatacaaagcttaaacaagaaattggcgaagaagtggcaaaagttatagggctagagaatataacaaagaaaattacaaaataatgaaagttgagggatgaggaatgaaaagtacaggagtaattagaaaagttgatagtttaggaagaatagttcttccaatggagctaagaagaactttaaaaattgaaggagctgatggtggtgcaggaactccacttgagatttataccgaaggagaacacattattttaagaaaatatactccaggttgtgaagtatgtggggagatgaaggagttaagaacagtcaataataaaagcatttgtaaagaatgcgctaaaaaaatagcagatgcatggaggtaaaagtatggagacaaaaaaacaagatacaggattagcattgactaaagaaaatgcactaaacaatgtaatggccaaaattgatactttaaagaaagatacaggtatagtattacccaaaaattattcagcggccaatgcaattaattcagcttggttaaaactacaggatgtcaaagataaagaaaagaaaccggcattagaagtatgcagcaaaaattctatagtagaaacactttacaatatggttctacaaggattaagtccagcgaaagaccaatgttacttcatagtatttggtggaaagcttcagctcatgaaaagctatctggggaatattgcagcaacgaaaagattgaaaggtgtaacagatgtagttgcaaatgtaatttatcaaggagatgaattcaaatatgcaatagatcctattgacggaagaatgaaaatattaaagcatgaacaggaatttgacaatatagatgatgataaggttcgaggagcttatgcaatagtaattttagaagatggaaacaacttcattgaattaatgaccttaaagcaaattcagcaagcatgggcaatgagtaggacatattcacctaattcaaaaacgcataatgatttcaagggtgaaatgtgtaaaaagacagttatcaatagagcctgcaagcattttactaagacaagtgatgattcggatgcaatagttgaagtagttaataaaacatatgagtatgaccaggaggatatcattgaaaatactcatacagaagtaaaagaagaaattaaagaaaatgcaaatcaagagattatagatattgaacctactcatgtaaaacaagataagccaataaatcaacctaatcctataaatgaagagtttgaggaacctagcttttaatctaaaaacaatgaggagtagtcctcattgttctgagggaagtgattagaatatgccaagaaaagttaatattgagattggagaaaaatttggagagttaataattgtaaaagagcttgaaagtacaaataccaaaagaagaaaaagacaatttttatgtagatgcagttgtggaaatgaaatacctatagttttagataatttaagaagtggtcatacaaaaagttgcggatgcataaaagctaaaaatatatcagattctcacaaaactcatggtttaagccacacaagaatatatgctatttggaatggaataattcaacgatgtaaaaatgagaattatcataattacttaaattatggtaagaaaggaatacaaatatgttctgaatggcttaaatttgaaaatttttataattggtcaattaacaatggatatactgataagttatctattgatagaaaagatttcaatggcaattatgaaccgtctaattgtagatgggtagatgatattgcacaagctaataataaatcgaacaatgttaagcatacttataaaaatttcacgggaacaatatctgaaatatgtactaagttcaattcaaatactaaattagttacaagcagaatatatcaaggattcacaattgaagaagctattgaaactataaaaggaggacatagaaagtgattacggtactagcaacaggtagttctggaaattcatatgcataccaagtagggaacgaaatattgcttttagaattaggaatacctttaaaaaaaataaagcagggattaaattttaatttatcaaatgttgtaggagcttttgttacacacgagcacttggatcatgcaaaaggggttaaagaggctttgagtaatgctattgatgtttatttaacacagggaactaaagaagctttaaatatagacggatatagattacacatattagaccatgatgaagactataggtattcaagtattaaaattggagattttactgttttaccttttcaatctcaacatgattcaaaagaaccagttggttatcttatatatcatcctaaagatggtaaaacattatttttaactgattcttattattgcaaatacaagtttaatgatttaaacagaatattaatcgaatgcaactattcggaagacgtgttgccacagttgccagcgtggagggctagaactattaaaagccacatgagtttggagacattaaaagaagcgcttagaacgtggaatttaggcaatactaaggaaattgttttaattcatataagtcaggataatggagaccctgatagatttcaagcagaaataaatgagcttacaggaatagaaacttatgtagcaataccaggattagaaatagtacaacaaaggaagtgattacgtggcaggaaaacgatattactggttaaaacttaaagaagatttttttgaagaggatacattatcttggatagaagagcaggaaaaaggtaaggaatattgtttgttttatttaaaattatgccttaagtctttaaaaaatgaggggattttaattagaaatgtgggacaaatgttaatcccatatgatgctaaaaaattagcagaattgaccaaaacagatttggatacagtaatagttgctatggagttatttaaaaagacaggacttgtacaggtattagaaaatggtgaaatatatttaactcaactaaagacaatggttgggagcgaaacaagcaaagctgaaataatgagaaagaaaagagaaaaggataaattaaaaccatcaaaagaaagtaacaacgttactgctataggtaacaatgttactcaaaatatagaaaattgttacacagagacagagacagagacagaaacagagctagagacaaatacagataaagaactagaacaacaacatatagaaaccattttaaaaaataattttgataatgaagaaatagaatccatacggaaatattgtattgaaaataatgttgctgctgatgttgttgttgaaaagattgaaataataaatcacatgaaaaaaataagaaataaggttggtgccttattgacagctataaaagaggattggaagccttcaaaatcacaaagtaattatgttgcagtttctggatttaataactttgaaccgagggaatatgactatgattccttggaaaaaaagttattaggttgggatactgattaatttaaaatggggagaacaatggaaaacattgatttgaaaatagttgaagttaagggtataactcctgaaatattaaaaaaaatgatttcagagtttaatgatccaagtccagagcaaaaagcagctgaggaaatattcagacttagagaattactttcaaaagctgataagcaaaatgaaatattatcagatgataggaagagacttaagaatattgtggatttagctttatcagtaataattcatatttcaatggctgataataattcaatcaagcaaatccaggaattaaaaacaaaagcagagcaggcagttagagcttcagaaatattagatattctgatttcataggtgagctgatgaagatgatgatattaagccataataaagaaattaaccaggataataataaatggacttttgaagaaatagcaaagaaacaccttgaagaatccaatgaactagctatagctttaattgaaaaagacacaatgcatattgcagaagaggtatttgatcaactccaaatatgcattgatgtacttgataagcttgaatcacttggaattaacattgaacaaatgtgcatgagacataataaaaagttagtaatgcggaaatgggtggataaaggagttgttgaaatagcatggcagaagaatgtctaatttgtaagaatccttattctgaaacacatcatatagtttttagaaaacagcaaccggcaatgataaattgccctttcaataaaaaaagactatgtgcactatgccataaaggtaatagtggtccacatctcaatagagatatagaccttaattataaaagagaacttcaaaaaaagttggaggacttgtttagaactaagaattgctataccgaagatgaagttaaaaaaatattaaaaataccacagaaagatgcctataagttggtcaagccattgctaacaatcattgaaggtgatgaagtcggatatagtaaggaggatatcataagacaagctatgggtggaaaaatatattaaaaaataggaggaattaagatatggaaaacatgattaatttagaaaacttcgcagatggagcttttgctgaaaaagtaaatatggcattaagagaagttttagcaaatattactgatccaaatactgactataaaataaaaagaaaattaactatagatatgactttcgtatcagatgaagcaagagaattaactgaagtagcaataatagcaaaacctaaattagcaccaagcaaagcgttagcagctaagattgttattggaactgatggatcaggtggaatactagcaagtgaatatagaaagcaaattccaggacaatctacaatgaaagtagacgaagaaacaggagaaatattaacaacagctgaggaaagagaaatagatttaaaaggaattaagttagttaaataatttattggaggtatgtaaacatggaaggattaaaagacggatttgaatatttagttcaactaggagaagataagaaaccaattatagaaacaccacaaggaactttttcaacagtaagcttaagcagagtaaaggaaccaagggcagagtcattggcaataagcacattaacaggatttgtagattatattaagagcaatattgatgctattgatactaagttattaatccatgtagtatcaccaagtgttgtaaaactttatggaccattaaatatagatagagacagagaaacttatttagcagcaggtgcagatttaccaaacaatattcgatatgaaagattcttggatacagaggcattcaatataatgttgcaaagttctttcacagatcaaggagataaagaaattttattaaaatatacaggcttaatcaaagaagaaaatgtaaaagatacaggtgatgatggaataagccaatcagtaacaattaagactggagttgcaagtgtgggacaagcacttgtgcctaacccagtaagtttagcgccatatcgaacatttccagagatagaacaaccattaagtaaatttatatttaggatgaaagatggccctacagcagcactatttgaagctgatggaggagcttggagaaatcaagcaatattaggcattaaagaatatctacaagaagagcttaaggaaattaaaaatatagaaataattgcatagaggtatatgttttgaagaatccaggaaaagcatttgaagaagattttaaaaagtcagtaccaaaggattactgggtatatagatttaaagatggtaccgcaaactttgatggagctaagaatgaaaatgtgaggtttcaagcaaaaaatatatgtgattttcaggtaatgaccaataaacatttattcctattagaacttaaatcacatgcaaaaataagtataggatttagctgcataagagagaatcaagtaaaacaaatgtcagagatagagcatccaaagataaaaacttacttcatatttaattttagagatttggaaaagacatttgcaattgaagctaagaaagtaaaagagtatatggaaacagctcaaagaagttcatttccattcaaatggtgtgaagaaaacgggattgaaattctatgtatcaaaaaaagaacaagatatcagtatgatttagaaaaattttttagtatcaaataaatcaatcattagtaagcttgcggacaagttgtttgaaactgatacaagcttactaattcaaaaaatgggaggaaattatgagtaaacagtgggtagcattaagacttaaggatatgtatgcaataaaacatgccttgcaattgcaaattaaatctaaagagaaaaggctggaggaattagaaaatattcctgatattcctgaaaaagagcaattagttcaagatatatctcatgaaagttggctggctcaaaatatggaaaatgagatattagactttagggaagcttacaatatccactaggtatgccaataaaatttaaaagtgaaagccagcttttactaaagagaggatgaataaaatgaatccacagggattaatgaataaattagatacatgtatattagccttatctcaagggaatatagaacaaaagaaattaggtttagaaaaagccaaaacagaaagagattatagaattaaatataatcaaaagatgctgcacttaaaaatggacaagtgccaagcaacattaatttcatcattagcaaagagtgatccggaagttgcagagttaggaatgaaaaaagacattgcagaaagtgcttattatacatgcataagtgcaacagagaatttaagacttgaaatagaaataataagaacaaaattagcttggatgagagcagagttaacaaatagctagtagggcaatgtgatgatagtaattgaagccatacctttcaagacatttaaggagcgacttcgattagtaaaagagtatgacagaaaaggcagggtaagagtttatagtaattatgtttatgtagaaatacatgagaaggggagatcgactaatgaattatataaaagaggcggaagagtatttaagaagttactctgatttaaaagattctatagtcaatataaaaaaggaattagaattcttggagttagaaataacaggagcaaaggcaattgactacagtggaatgccaggaggcggaggaactgctttacctgatgatcgtttagtaaacctattatataaaaagcaggtgaaagaagcggcattagaatctacaacaaatacactatcatatatcaattatatatttgaaagattaagtgaaaaagaagctaaagtattaaaggcattttatattgaaggcctaaggggaacagcattagaagaaaagtttaagatttgtgaaagacaagtatataacctaagacaaccagcaataagaagatttgctaaacaattatttgggattaaagctattggagaatagggaggtaagctaagataatgaaagttaaagagattaataatgtatcaatagaaaatgatatgaataaatggctttcagaaaataaagataaaatgattttagacattaagtattcagctgataatgaaagttcaaatgtattaataatctatgaggaaccaaatgaataggaggtagacctatgattgaagtttatacaggaaagatagtgcaagataaagatactaagaataaacatgaaattattgcaactggagtaggcggacaagttgtatggtgcaggaaagcaggagatagatatggagctaggacatatcagcttaaagtagaagacttggaagatataaatgaataaggtaattctaattggaagattaacaaaggatcctgatttaagatttcttccaggtagtggagctgctacaactagcattacattagcagtagataaatataacacaaagactggccaaaaagaagcggattttgttccggtagtaatctgggggaaacaagcagagagtactgctaattatatgagaaaaggccatcagatggctgtatttggcaagattcaaacaaggaattatgaaaacaaagatggtaaaaaggtttatgttactgaagttgtagctcaggaagttaaatttttaagcaaagcggctcagggacaatctcaaaattcatttaatgatgatccttataaaggattaggtgatgatgatttggaacgagtagaagatgatggaacaatgccattttaagaattaggtgctggtattagtatcagtacctaaagaaaggggaataaacaaatgaacgatttacaagttttcaataatgaacaatttggccaaataagaatgcttgaaattgataagaaaccgtattttgttgctactgatattgcaaaagcacttggttatataaatacaagcaaggcaatcaaagaccattgtaggtgggtaacaaaacgttatatacctcacccacaaagtgaaaataagaatttagaggtaaatgtaattccagaaggtgatatataccgccttattactaatagtgaattaccaggggcagaaaagtttgaaagttgggtatttgatgatgtattacctgcaatcagaaaacatggaatgtatgcaacagatgaattattagataatccggatttacttattgctgcagctacaaaattaaaagaggaaagagctgcaaggttggaagctgaaaagaaggtaaaagtattggagcctaaaggagaattctatgatgatgttgcaggctcaaaagacagtatcgaaatgggtcatgttgcaaaggttcttggaatcaggggcataggaagaaataatttatttgcattgctaagagataaaaaggtcttggacagaaataacattccttatcagcaatatgttgactgtggttacttcagagtattggagcaaaagtatacagtccctaatggagaaaccaagattaatataaaaacaatggtatttcaaaaaggtatagatttcataaggaaaaagattaaggaaccataaacaataagtgaggtgagttagttgaaaggcagaaaacttaaaatgagtgagattattgaaaaaagttataaatgtgaacctatctatataaaaagtaatcaagctgatagggaaatcttagttgatatttcacctaaaagccttattgatttaataaaagatatagaagatgaaggtgaagcttatgaatatatagatgaatccaaacttgattcaatagatctgaaatgtaaagtagagcattttgcaaagcagcataataaattcaggacaagcctagatgatacagaaggggttaaatgggtaatcggatataatttcgtgagtaataatttatattgttgggaagtagaaatgcaaaattcatcatttggaacaatatattttagttctgaatcaattgcaaatgaatgtattgacagatttaaagaagaattaagcaaatattttataaagcaagggaaggtggaagaataatggcacattggtgtgatacatggccacatataattattgcttcagtaatattaaaagataataagataaaactttggaaggttggacaaaatcctttgagggataagtacagcattgaaatgttaataaaagagcatccagagtactcttatgaagaaaagaaatggactgtatacaatgatctgggccacaataaagtattttatgaacattcaaagaattggtttaaacaatgggaattacatcctcaacatttaggtggaagtccttttgtagatgatggtttcgattttgaaaagatatttggtggaagatatgaggttattaaacctttaaagataggagactaaatggctaaaaaaataaaatgcgatttatgtgaaaaaacaatactttataaaaacaagataagaatgaccaataaaataaataaaaatactattgatatttgtaaagaatgttatgatgaattttttaataaatcagattcaaaaaaataaggtgaagctatggaatggatattactatggttagataaagaatcaaatacctataaaaataaagtatttgaagctgatacagagaaaaggcacttattgcagcacataaacattttgaagaattaagaggtaaatacagcgagccagaattatatgaatatgagaaatataaaatcatgcaagcagtaattccgatagaaaagtatgaaggatgtaaatattgttgctgttctgactgcccttacgaatgcaaggaatgtaaggtttgtaataaaggtatagatggaataggaagatgcagtaaatatcatgcattagaagaacctattcaaattaaattttagagaagtagaacaataactaaatagagaatagagcttaaagcattagtaatttaagtatctattctcaaataactatcagtatcaagggaaaggagtaaattatgggagctaaaacatggagtcaagaagaattggatttacttgaagataaatggggaatagtatctattcctcaaatagctaaaactttagggagaacagtaaatgcagtaaaatgtaaagctcaaaagatagggctagaacgatttatagatcagggtgagtatgtaacatttaacaaatttataaaagctataggatatagtggcagctatagctacttagagaaacgtcttttaaagctaggttttccaatcaaacataagaaatcaatagaaatgagttataaggttatttatattaaggatttttggaaatgggcggaacagcataagcaagatctaagttttgctaaatttgaaaaaggaattattggtgaagaacctaaatgggtggatgaaaagcgaaaggctgatttaactaatccaagtaagcttaatcatagtagaaagtggacaaaggaagatgataacttacttatagaaaaaactaagtcttgcagatacacatataaagatttggcaagagactttaatagaactgaaaatgcaataaaaagaagactatatgatttagcagtaccatataggccggttccgctagatactcacattagatggacagaagaagaaaataaaagaatgtttgatcttcatgaaaaaggatatgacacatatgcgattgctcaaatactaaataaaactcatttaagcatttcagatagattaaagaaagtggtgagataggtggaggcggttgttaatgaaatattgcaagaaataaagattaaatgcagtgatgatgtatataagcatttaaacaatttcattacagtaaaactgaacggatataagataaccaaagaagaaacaggattaataaaatatgaattaactgaaagtgaaaaatggttcaaaatgttttttataacaaaaaaattacagggattatctgatagaagcttaaaatattacagaaacactttaaatcaagcctttaagagaatagataaaccttttaatttaataacatctgatgatataaagtatttattagcaaattatcagttaggtggaactgtaaatcagactagcgtggataatatgagacgtacaatgaatacattttttcaatttttagaagatgaggagtatattttaaaaaatccttgcaaaaagattaagaaagtgaagcagaaaaaagttattaaaaaagcctttaattataaggaaattgaagaattgaaaatggcatgtggtgataaaagagagattgcaatagttacatttctattatcgactggagctagagcagaagaagtttctaatgcgaaaattagtgatgttaattttaataccggggaagtaaaagtgactggcaaaggcaacaaagagagaattacatttttaaatagtgcagcacttatacgtctagaggattatttgaaaaatagaaaaggtaatagtgaatatgtattttgtagtgtacaaagtccatataaacaattaaaagtatctggattagaaataattattagaaatatagggaaaaaaactgaaattaaaaatgtacatccgcatcgatttaggcgaacatgtgcaacaatagcaagtaagagaggcatgaagattgaagaaatacagaggatgttagggcatgaaagccttgcaacaactcagctttacatccaggttgatgaatcagatgttaagaaatctcatgaaaaatatatgaattagaggtgctatatgagtaaagcaaatatggttaagatgtttcaagatttatcatacaaacattccctttgggaagtatattcagattttttagaaatgtcagcgatagtgataagtaattctttagatattagaaattatagaaccagggaagagagatatctagaaatagtaaaaaagtatacaaaagaagaattggcgatatttccaaaattgttagtagaattagctcacgcactagaagaaaaagtaagtgatgttttgggagaattatttatggaaatggagttgggaggaaaatggcaaggacagttttttacaccttaccatgtatgcctagcaactgcagaaatatcatttcaaggtgtagataaaattatagatgaagtagggtatataactgttaatgaaccagcatgtggtggaggagctatgatattagcgttcgcagaaataatgagaaaacatggatataatcctcaagaacaaatgaaaatcatatgtaatgacctggacttaaaagcggtacacatgagttatattcagcttagtctgttaggaattccggcaagggtttatcacatgaacactttaagtatggaaatgtttagtgagtggaaaacacctttatggttattaggaggatggacatataagcaacctaagaaaaaggaatacaatgttaaattagaaactgaagaaaatggtcaattaaaaataatttagtaaaattcaagaaattattaggagtgataagcatgggaaatgataaaaaaatattaaaaaatgtaaacaagttattagcacaacaggaatttaaagaaggaatggaggctcttaggagtcaagttacagagtttgctggttatcatcaaacagtatttctagcaatgaaagaaaagggatattcaaatgaccaagcttttaaatttgcatcagatgctacaaccgtaaatgtaattcatgcaatttctaaaagaatgagttagaatgaaattatgtttttagttaggggaggtcagaatggtgaaagattataaatattctttagaaattatgaaacaagaattaaataataagtatattagtccagaaataaaatatgcttttgaagcaagcatagaatcattagaaaaacagatagaaaaagacgcaattcctaatggtggtactgatccatatttccattgcccagtatgtggtgaatttgaacttgaggcaaaatgtgaaaattattgtcctgaatgtggccaaaagttgaagtataaataatattactattagatgcaggaaaatttcaaaaatatttcatagacttttaaaaaaacatgtgttttaattaagatatcaaatagggaacacaaaaggagttcaatcaaaacggttgagctccttttgttatgcctaaaaggaggtgaggaggatgaaagtggggcaaatattaagagaaaatcaggaagatgtatataaacaacttaatagtaagcctaaaaagagacgaaggaggagaaaaaagaaaagagatactaattctctctccttctcagacgtggaaagtttaatgagacatgatagctataccagaggaaaaggtggagctataaaacaaaagacatgggggaatagctgatgcaaatagaattaattcatatcgataaaataaaaccatatgagaataatccaagaaataatgatgcagcagttgaaaaagttgcagaaagtataaaggagtttggctttaagataccaatagtagttgataaggataatattattattgccggacatacaagatataaagcagctaagaagttaggattagaaaatattccggtaataaaagcagaggatcttacagaacaacaagtaaaagcttttagaataatggataataaatcatcagagtttgcaacatggagggcaaattaaaactgaaactaatatgcaggaacttagcattgaggaattaagaaaactagcaaatatagaatagaggtgaaaccaatggctgacaaagaacaaattaaaaaagcatatgcaactggaaagtatactttcaatcaattagcagatgagtttaatgtcagtattggcactattaaatcatgggctaagagagataaagattcagggcaaccatggagtaaggttgcaaccaaaaacaaaaataaggttgcaaccaaaagaaaagttacagaggataaaaaagaagaagtccttaccttagcagctataggaaaatccaaaaatgagataagtaaagaagttggaatagcaaggtcaacagtaagaaatattattaatatgagtcctgatgaacttaccagttaccgccaagagaaaaagatggagtttattcagcaggcatgggatacagtaaataatgctttagcttatggaaaccaaaagataatattggccactgtaaccgccgacacctttgatgaaaagattagtgaactaatacaagccatgaaggataataacgcagacgcgagggcaataagcgaaactgtgaaggctctgtgttcagcaatgaatattccattgaaagatatatctacttacattggaactctttatgataagcttgcacttgccacaggagaatcaacagccaacgttaatgttaatgctaatataaccacagtagatgaagcggtaaaaagtatgtctattgaggagttgaggaaccttgccaaacttgagtgatagtcaaaaaaaagctatagctaagatggcaaagatagaattatctaaaaggtgcttttgggattttgaacaaaccatatatcccaaattttttaaagaggatagacatcacttaaaagaaatagcagaaacttttcaggcattgtatgagggcaggatcataaagttaccgccttcaaaagaatgggatatagttgagagccttgaaggattatcaggatatgttacatgtaaaaagataattttaaatatgccacctagacatggaaaatcatttactgctactaactttgctaaatggctattgggtaaaaataatgagaatagaattattactgtttcctataatgaaactctttcaggaagatttgctaaggctgtaagagatggaattgatgaagaaaatttagaacaaaagaaaataatgttttgtgatatatttccggatactaagataaaacgaggtgatggagcttatcaattatggtcattggaaggacagttttttaattatctagcaacttcaccaactgcaacaattactggtgtaggatgtaatattggaattatagatgatatcatcaaggacaaagccgaagcttacaatgatagagtattagacaaccattgggactggtatgtaaatacatatttatcaagacttgaagaaggtgctttgcaaatagttattatgactagatggtccactaaagatttatgcggaaagctacttcaagaagagccagacgaatggtatgaacttaaaatgaaagcttatgatgaagtcaatgatgaaatgctatgtccaagtttattaagttataaaacttataaagataagaagtcaaagacatcagaagatatcatggcagccaattatcaacaagaaccagttgatataaaaggtaagctttatagtgattttaaaacttatgcaactatcccagttgatgaaaaaggcaatcctttattcacgagtattgaatcttatacagatacagcagatgaaggctcagattatttatgtactattgtttatggtgtatataacaaagaggcttatgtgctagatattctatatactcaagatggaatggaaaaaacagaaccagcaactgcaaagatgttattttccaatgaagtaaatagagcaaagattgaaagtaataatggtggtcgtggttttgcaaggtcagttgaaagaatattaaaagaacaatataagagcaataaaacaaaaataacctggttccatcaaagtcaaaataaactggcaagaatattatccaacgcaacatgggttatggaccatatttattatcctgttaattggagagataagtggccagagtattataaagctatgaatcaatatcaacgtgaaggaaagaatgcacatgatgatgcacctgatgctacaacaggagttgcagaatcaatgtacaaacctaagatttcattaggatacacatagaaggaggtgagaacaataggaatatttagaaaagcaaaaacagcagtaagaaaaatgtttcaaggatattattcgcaagtgctacagataccacctagcttaaacacacaggattatttaatccagtatggtaagattgggtggctgtttgcctgcacgtcaagaatagccaatgatgttgcagatacagagtggaaagcttacaggaaaggtgaagaagatcctttaaaaagttctaaagcattagaattattagaaaatcctaatccttattttagtagatttagaacattagaacttacacaaatgtacttggatctagtaggaaaatgtttctggtatatagccaaagatagagcaggaagaccggcgcaaatttgggttataagtccactaaacatgactatagttccggacagagataattttatcaaaggatttatttatcaagcaggagcacaaatggttccattaaatacagatgaagttataatgttttcttatcaggatcctaacaatccttatgatggagttagtccagctaaggcagcagccattgcattagaaagtgacaagtttgcttcacaatggaatagaaatttcttttataataatgcagaacctcaaggaattgtatcatttccagaaggtgttgaagaagatgattttgaagcttggatagcgaaatggaatgataaatatggtggtgtaggcaatgcaaagaagactgcatttattcgtggtggacaggttacttatactgctatccaaataagtcaaaaggatatggatttttataatcttagattaaataatagagatgaaatacttgctatatttggtgtgcctaagtcaataattggtattgtagatgatgtaaacagagctaatgcagaagctagtgaatacacttatatgaagcacacaatatcacctaaattaaaaagaatacaggacattattaataatgagtatgttcaactatttggtgaagagggcgttgaacttagatatactgatgtggtacctgagaataaggattttattaaatcggtagttgatagccaaacagataagtctattactaagaatgaagcaagaaacattttaaataaacttctagggcttaaattggaacctttggaaggtggagatgtaatctatcagcctgtaggtatacaacctatgggaacccaaatgccagcggtaagtaatgcacttaaggaaccacagaaaaatattaaaaaaaaacttcaattaaaacttaaaagcaagtttgagaatattgataaggaagcttattggaaggcctttgttactaaaacagataaacaggaaaaagaaatgcagccaatctggaaagaaatttttaaacatcagaaagaaataataattgctgcacttaaatctcataagtctataaaggcaataaatattgatgatatactaaagtttttatttaaaagtgaggaaacagattatataagagaaaccatattgcctatgcttagaaagattatgcaggataaaggcaatgaagtcatgaatgaattagaaactagtacatcatttaacttacatgatcctaaagttacagagtggctttctgaatactgtggtaaacagattaaggatattaatagtaccacagaaatattgataagagagcagcttaaacaaggccaaggtgaaggggaaagtattccaaaactttgcgatagaataagtcaatactttgatgatatggaaggccctagagttaaaacaatagcaagaacagaagtaataggagctagtaataatgctactcttgtgggatataagcaaagtggagtagtggacaaaaagcaatggcttactgctattgatggaagagaaagagaatggcatgcagaagctgatggacaaaccgttgaaatagatgaaaaattcattgtaggcggtgaggaattagagtgtccaggtggtatgggtggaagtgctgagaatgtatgtaattgtaggtgtacaatgttacctaattttgattagaaggagatgttaaaagtgagcgttaatcaagaaaaagaaaaaattagaacttttactggcaaagttgaaatagatgctactcaagctaaagaagaacttaaggaaattgaagtacaaattgatacattaactaaaaaatataaagaatttcaaaagttatcagggagagttaatttagtacgagatatatttatatttttggcatctgtagcatcaatgttttggttattcaaagacaattcaatttatgctgtatattatttgattttaattttagtaataggtcaaatatataagaaaggttaaggtgatccaatatctcgcaaagccagcgttaaggcttatttttattatactaggaggaatttatattatggaattatcaacaattcaaaaaagagaaaaattaaatacagttagaactatagatgaagtaggtccaggtggagcttatcatttatatcaaattacaagtaacgaagttgatttaaatggagttccattattgctagaagaaattgaacttcaaaaaggacctagaaaagataaaagtagtgttaatggtgtaattgatactgacttattagagatagtaagacatagactacaatgttttcaagcagggcctttttcatctcgagaaaatgcttgtgcattaacccatattgaagaagctttaatgtggatgaatagaagagtagaggacagaatcgaaagaaatgtgttaggtacaaataataagtaattaagtcttagaaataaggctttttattttgccctgagaggtggtgattaattgaataagcggctaaaacagtttacttgggaagttaaggtattagatgaagcaaaccgtattattgaaatgataggcagcactgaagattatgatagagttggcgataagatgtttatgtctggtgccaaactacaaaattatcttaagaatccagtgatactagcaaatcataattatggttatggtgaaaaacctactgttattggtagagctttaaatgttactgtgcaaggttcacagatgatatttaaaattcaatttgctgaaacagacaacggtaaggagtggttttatttatatgctaataagtatatgaatgcaagttctatagggtttatacctattaagtacaagccaaatgatcaaggcggttatgactttacagaatgggagttattagagttatccctagttgcagtgccatgtaatcctaacgccatccaaagagcttttgatgaaggtaaaatatcaaaggctttttttgatgaaataaataaaaataatgaggaggatattgaaaatatgaaagtagaagaagttcaagctttaattgataaagcggtagacaataaagtaagtgacataaagaaaaattatgaaacagaaatagcagataaaacaaaagaaattgaaactctatcatcaaaaataaaagatttagagggacaattagaacaaaaggctggtgcaacattaagtgctaagtctaaagaaacattaaaagggatttgtgaaggcttaaaggctcatgcagatacattagaaaagtttgtaactggtgatgattcttctaatgataatcaagatgatgatgaagaaaaagattatagtgaagaagatattcaaaaagcagttcaagaaaaaattgaaaaagctttaaagggaggtaaataataatggctaaaatgacacaaaaagaatttaatgacattgtaaataagacaactgagggcatattaaatactccagctatgaaagcagtaattaataagattgatttaagcggaggagtagatcctgaccatccaagtggagcacctgaaacaaaagaagttaaaacagttagattcttcaaagcattaatgactggtgatatgactgttgcaaaagatttaagtggaggaataagtgatcaaggtgcaacattacttccagttgaattcagaaatgatatcatagacagagtagttaagcagcctttagcactaagaagtagagttactgtagttcctgtaggatttagaagcggtacagttccaactgctgatggtggtattgtaatggcatggtcagataatgattccaaaactgacaataaacaagatcctaagttcaataacttaagttataaagttcatagacttgatggatatactgctttatctaaggatatgatttcagatactcctgtttcagtttataatttcttattaactttatatgctgatgcatttgttaaagctgaaaatactgcaatactttgtggtgctggtgatgcgtcaaatcaaccagaaggaatcagagctaacactgatataaaaagtatagcagttaaaaccgctggtactttatcaatggatgatttaatagcattaccttatgagctaccttcagtatatagacaaggtgctatttatattgcaggtacatctgtaattaaagaaatgagactaatgaaagatggtcaaggaagatatttatgggcagataataataatgtttctgagggacaactaccaacatttaatggatatcctgtagttgaacttgatggaatacttcctgaaaatcttggaactggccacaatgaaacagaagtgatatttggtaacttcaaaaattattatttatttgacagaggagaaatgagtacagaaatgaatactacttcagatactgctttcttccaaaacagaatacttgtaaaagtatctaatagattagatggtaaattagcagttccaaaatcatttgttaaacttactggtgttccaactggaaaggctgcatcttaatttaagactataggttaattctatagtcttttatattggaggtacaaatggataaaacagttaaatttataagaaatcattcaccatattgcgctggggatatagctggttttgatgaaaaacaagcaaattggcttgaaaaagctggagtagtagaaaaggcaaaggaaggtggtaaaaatgccactaacaacaatagaaaaggtaaaaagttatctacagataccacaaagtaatacaaatgaagatatatttcttcaagatatagttgattcagttcaagagcaaatagaaagccattgcaagagaaaatttgatatagatacttatatggagactcatcaatgtaagcataaatgtttccctaagaatacacctttaagaaaagttgaaagcattgtaagagatggtaataatttagaatccaatgactataaaatcaaaggcaattatgttgaatttactggagatttaaagggatacacaattggtggtagtgtattatatgcaaatgatgatatgagtgaagtagaaattacctatatagcaggatatgaaacaattccaagtgatttaagcatggcagcaactaagttagcagttattgagtataaggatagtagagaaaataggctcggtatagagcaggagaaagaaggagatgtacaatatgtatattctaaaaaagattctgaaatgccagagaatattttaaaagtaattgctaaatatgtgaggatatcattatgaggcatgatgatatatgtgtaataacaagaagtaccacaattaaagatcctaaaacgcatatagctaaacctcaaactgttaatttagaaccttttaattgtagattaggtagagctagtggtaatttaactcaagctacaccacagggagtatttattcagcagttaaggctttatatacctaatacattagttgatattaaaagtggtgatatagctactataaataacattacaaaatacattgtaggtaatgtgtataaaccgaataggcaccatatagaggttgatgttacttataaagaggaagtgtagttatgggatttgaagttgaaggattagaagaatggaaacaaaaattattaaaattgtcagatgaagttttcccaaaagaaaaagagagggaactcaggaaattaggattaatggttgaaagagaaataaaacctttaattcctgttgatactgggagactaaggaatagtattaatacacaacttattgataaaaatactgctgaggtaggaacagatgttgattatgcaaagtggattaatgatggacatttagtatcacaaagatttcttcctgctaaatatttagatacaccagcaggaagaaaatttttaaaagatggtaatacaaaaggtataatgttacatcctcaatatattttaggcaaacacttcatggaaaaaggacttcaaaatgcagaacctaagacaagagcagagcttgatgcatggcttgatgaaatgttgagaaagttaggtgaatagcctatatggaagatgaattaataaatgctattgcagcaataatagctagtaaatgtgaacacacaatttttatagatgaggtaggagaagactttgaaaggccttctttttttatttacagaattagtgatttagatactgttatgaacagatggacctataatacaaattctataatccaaatagtttattttagtccacttgatgatcataacaatatagctagcacagcagaccagactaataccataaagattataaaacatgctttcatggccagtatgggtgtaaagtttggagataaatttgcatatttagataaaacaaatacagattacacaggggataaagatatattcctacagctgacatttaatattacaaatggcactagaaaggaatatgaagaggctcaaaatactcaaacaatgaatgaatttaatttcaaagtaaaggagtgatgattgatgggagcaccgtcaataaacgtactttttaaacaaacaggaattactgcaattaaacgtggtgaacgtggaattgtggctttattattaaaagatactgtaccagcaactaatccaatagttatgagtatagtatcagatatacctgcaacattaagcgctgagaataaagaacaaataactttagcctttatggggtatgaaaagccaccattgaaggttattgcttatgttattaaagaagatactacagattatacagaggcgcaacattatcttgagactattaagtgggattattttgttttcccagaaatagcagatggagaggtaacaacttttgcaacatggattaagtcattaagggataccatagataagaaagttaaagcagttcttcccaattgtacagcagaccatgaaggcataattaattcgtcaaatgcaaggaatgtagttggaactactatatataatgctaaacaatattgtgcaagaatggccggaatatttgcaggtacaccacttactattagtgcaacatatgcacctttaagtgaattaactgattgtgaccatttaactaaatctgaaatggatactgcagttgatgctggaaaacttattctaatgaatgatggtaaaaaagttaagatagtacgagctgtaaacagcttgataactacaacagcagataaggggtcaatatttaagaaaattaaaatagtggatataatggatcaaatacatgatgatataaaatcaactgtaagtgatagttatattggaaaggtaccgaatgattatgatcataaagttttattaatgagtgctattggtggatactttgaccaactagaacttgcaggacttttagataaagggaaaagtagtgtgtatatagatctagaatctcaagcggcttatttaaaatctgttggcactgatacatcaactatgagtgaacaggaaattaaggaagctaataccgaagataaagttttcattgctgcaaaagttaaaatcctagatgcaatggaagatattaatttaaatatagcagtttaggaggtgtaaatagtgggaagaacaggaaattataatgaagaaaaaaccatgtatggtaattttggagcggtttttatagaagattctcaagtaaatgaagctacagggttacaagctaaatgtaaaataaataaagtagaagttcctatgtgcggaacaatgtccaaaaagtacaagcatgtaggctgggatggttcaggaactttaacaatgaataaagttagtacaagaatggggttacttattgcagagaatatgaaagctggaaaagaaactgtttgtacaataattagtaagatgagcgacccaggaaatggtggaactgaaagagtaagacttaatggtgttaaattcgatgaattaacattaattgattggtctgcaggtaagctaggaacagaatcaattccatttacttttgaagattttgattacctagatactattgatccaagcacaatataaaatattaattaaatttttaggaggaaattatcatgagcaataaaatggatttgttattaaagatagatacaactaaattagttaggcctgaaaaggaagttgaaataacaagactttcagctatagttggggaaaagtttactattacttgtcatggccttacagcaaccgagtttagtgagttacaagagagtgtatcattaaatacagatggtaatatagatttagataaaaatattcaagtacaaactgtaattaaaggtgtcagtgatccggaatttacaaaccaacaggtaatagaacattttggagcagtaaatgcaaccgaagcagtgaataacatattcttaccaggggagatttcttctatttacactacaattactgagttgagtggatttagtagggatgctgtaaaagatgtaaaaaactcataaaagcagatgaggaagttcacttgatgtatgaactttggagggataagcatataactctcccttcggagttctggaatgcatctgctggagacaaattggtactaaaggcgtttcatgattatgagattgaagaaatgaataaaactagagcagaattcaagaggaacaaaacgcctattttcccaacaattgttgtataataattattgggagggagttatatgtttaaattaatgggaaaaatagcgaatttactgttactacttataaaactaatatgtataggcggaataacgatatttttgttttacggtttgtatctaatcttaaaaaaataatttattttaagcattctaatttatagagtgcttttattatgttcaaaaaggaggtgggaaattgggagaattaaaggcggtcattaatttagaagacaatttttcagcacaaataaagtcagctattagcagtaccgatagctttcaacaagcagtattaaaagctaaaaaggaaatcgaaagtttaagtagtcaaaggtatgaagctacaattaaggccaaagatgaagcaactgagcaaatatctaagactaaaaaagctttaaatgattttaaaactaatgtagctattatgattgcggctaaagatgtggcaacagaaagcatacaaagaataaaaggacatgtaaggctcttagttgataaaccatacagtctgattataaatgcgattgataaaacaaaatcaattattagcagtattacaagcagcatttttaatcttaaaactttagcagcaggaattgtatttggagctacaactaaggaaggctttgattggacaataaaaaatgcaatggaaaatgaaaattatctagctacattacaaacagtgctacatagtgaagataagggaaaagaagctttgaaatggtcttataaagatgctgcttccacaccttttgatgcaaagcaagtagtagctggtgttactcagttagcgacaagtggattagattatgaaaaatatttaaatcctttaggtgatgcagccgctgctatgaacaaacctttagaacaggcaatatttgctatgagtaaattgaaatctggacaacttggtatggcagttgatatgtttagggattttggtatatctaatcaagactggacaaaagcaggtgcaacgtttgctaagaatggtgaaatgacaggagtttcacctcaacaggcagtagatatggttactaaaatcattaatgacaaatatggtggattgatggaaaaaaagagcagtactgcagatggaatgcttagtaatatgggagataccataagcagtatgggcagaggattagctggaatagatgatgaaggtgtaatgatggaaggtggattatttgataattttaagaagcaactaacaaatatcgctccattattagaccaaattaaaggttccgatgcatttaaaaagcttcaaacggatgtaggtaatctagcaacagcaggtggagacaaattaactgcatttctagaaacttttaaagatcctgataaagtggaggaatatgaacaaaaatttaaagactttgttgctggagtaaaagagggtgctacagcagccattgaatttgctaaatcaatgactgaattgatgaaagaattaaaacctgtaattgacatggttgtagcacatcctaaattatttgcaggcttatttcttggatttgaaggtgctaaaggtggattaagtgttattaaaactcttaaagatataaaaaaagaggtaagtcctttaatgacagcagcaaaaacttttggcaaaggtgctaagggggcaacaactagtgctggaaaagttccaacatctgctgcttcaagtttgggtaagagtataaccaatggaattaaaggaatacctaagagtcttagcaatgttacgaatacagttagagtatgggctggaacaataggagctgtaataaaaaataatattggtaaagcatttagtagcttaggcaaaacagtagcatccggagttaaatcaattccaggtgcatttaagtcagtagttagtggaataagtagtgtagcaggttctataggaagagttgtaggttcattaggtaaaactatattaagtggtcttaaatcaattcctagtggatttaaatctataatcagtgttgttaaaacagttgcgagtgttgtcggcccagctattggaacagtagctaaattaattggtggaactttaatgacagtagtaagggtggcatctgctggtatagtaactgctattagagctgtagtaactgcaatgattgcaaatccaataggagcaataataactgctatagttgcagtttgtgcattattatatgaagcatgggtaaatgactggggaggaataagagagaaaactcaagtagtcatagattatgtaaaagaaaaaatagctgcagtacctgaagtatttgcaaaagtcaaagagaaagtattggaatttgtagattatttaaaacaaaagtgggaagaccttaaaaatttctttgcacatccaattgatggagctattaatattgctaagaagataaaggatagtgtaacaggtgaagaagacacagggaagaatgccttaggtactgactattggaaaggtggacttacatgggtaggtgaaaatggtcctgaacttttggacttaaataaaggttctaaagttataccaaataggcaatctatgaatatggtaaatgctttagcaaataatcctgctcaatttacaactatgcctcatgatttttcaaaaacaggagaacaaattccaaagtcattatcaaaaggaattcaaaaaacttctgatatagcacaagatacaatgacaaaaatgtctcaagatgttttaaaaacttttggcgatggaataactgataatgcaaaatatgctacaaagtctacagatgatttatctacaggcatacaaagtattttttctatattaggcaagaaatcaaatccattaggtagaaatgtaattgacggcttaggtcaaggtattcaagacagtagtagtaatgtaacagatatggcaaaaactcttactgataaggttattcagacattcaaagaagggtttgatattcactcaccttcaagagttatgcatgaaattggtggtcatgtaatgcaaggatttatgaatggattaagttcaaaagatttgaaagcatttgcagacaaacaaataaaaacagttacaggagcttttggaacagcagtaaatgttccaggaggggtagcagattggcttacacaagcacttattgctacaggtacacctttgagttggttgccaggtttagagaaattagttatggcagaaagcggaggagatcctaattcagtaaatagtcaaagcgttggtggagaatatgctacgggattattacaaacattaccgagtacatttaaagaatatatgcagaagggcatgaacaacatacaaaatccagttgataatgcagcagcagctataaattatattaaatctagatatggagatgtatatagtacaccattgtttcgaggtggaccatatgcaggatatgaaagtggaacaacttatgcaactccaggttatcattgggtaggtgaaaaaggccctgagcttatgaaatttaatggtggagaagaagtaataaatcataaagattcacaaaagggattaggaagtagggcaataaaagtatttgtaaaaattttaggtaatgtcattggtaatgaagagtttgctgatgaagtaggagaacgtatagtagataaggtagtaactgtattagatactaatatgtaggagggataatgtggaatatgatatttatgtaggtaacaaagataaaacaaaagtatacaagcttcctattattccggaaaaacttcctgaattgactaaggcaatacaaaatgaagagtttgagacttggtgggatggtaaatataactttatcgaaaagccaggtctattggagttttcattagaatgctggcttccagcaaaagatcatgattataattttgcaaaaagtactgttaaagcaccagaagtaattcaattactagaaaatgctagagacaatgcagaatgtataactatagtgattattggtagtgatggttctatatatgtaagtgataaattttccatagagtcatttaaatataaagtaaattgggaaggtgattatgagcattcattatccgtaaaaaaatatagggatgcagatgctgaaattccagctacagtacaaaaaacaggttggcttcaagattctactggctggtggtatgtatatgatgcaaataacaattattacagagattgctggcaaaaaatagatggagaatggtatagctttgattttcagggatatgctagacaaaatacatggcttcaagatggtggttattggtattggttaaaaaaagactcttgcaaaatggctaggaatgagtgggtttgggtagatggaaaaagttattactttggcgatttgggtggaatgtatgcaaattgttacacaccagacggatattgggtaggaagtgatggagcatggattcaataaaagtagtaacttcaaatgttgatatatctaattttagtaacaactactcatggacaaatgatacagatacactaggaactcaacttacatttgattcaataaaaaatatagctgatagtgctgttgtaagtttatatttcaatggtgctgaatactttaggggagtagtcgttgataaagatactaaaagatggacttatagttatattgtgcaagattactcattctattttaaaaatggtgtggtaaaacaatttaatggtatgagtgtaagtgatgctattaaatctttagcaagtgaatgttatttaatacctgatattgttgatatacctacagtaataaatcatatttatgtagatgaaataagtaatatactcgatgatttactagaccaggcagaaaaggatcagggcgttaaatattttaaagaaataatagctaataagctaatagttaaaaagttatctgatatggtaattactccaaaaataatattacctaaagatattaccattcgttcaagcatagaagaaatgaagaataagataactattgtatcaggcagtgatgataacgcttctattatagccacagcagaggacacttcacaacaatggtattatggggtattaagtcatacagaatcagttgatgaaacagatgcagctaaggcacagaatatagcagataatttattaaaagaaaagaataaaatttttaaaagtacaagctttgatgtaacaggagtaaaagatgctgaaacaatcagagctaatagaatgatatttctacatgtgggatctagattaaatgacttttacaaaataaaaagtgctgcccatacactatctaaaggagttcataaggtaaatataagtttggagtggtaatgcatgagttatgatgtgaaattagctaaagaattaaagaaaagaaataatcctagaccttcagagcctttacttggagatgttatttctgtggagcctttaaaaatttcaattatgaataaccaagtaattttaacagatagtttatgccacctatgcagcaacttagtgagtaattcaaaaggtgcggcttttgttttagatagtgtagcagatcatggaagcgtatctactaatggaacaataacatattctgatattttaaaagctggagataaagtaatgtgtgtaccaacagcaggagggcaaaagtactttatagtagataaaattctttaaggaggcggtgatatatatgattccaactcaagattccagtttgagtgaaaatactggaactgaaaataatattggacagggaattatactttcatataattttgaaactggagaatttaatatgaaagatggtaaggtgattgaattaactggacttgaaggcttaaagatgtgggttcaaaaagtgctgagaactgaaaaacataaattcaaaatttatactagtacagatagcacatatgcttatggaatttcattattagaatatattaattcagacttaccatatgactttattaaagcagaaattcaaagagaaattacagaaacactaataaataataaagatattacatcaattattgatttttcttttgaaagagttgatgatgtattaaatgtttcattcactattaattccgtatatggaacaacaacggaaggggtgagtttaaatgtcgacaagtgaagtaatattaactgaaatgctttcagatatagatgataagtatgataaaagcaaaggttcatttgtttatgatgtgttaagctctggtgctaataaatttgctcaatacgatgaatccattaatacaatggttgaaagaagatttgcaacaacagcaacagggaaggacttgcaatatgtagtagtggatcatggagtaatacctaaaacatctactaaatccaatggtccagttactattacaggcatagcaggttcaccaattactaaaggtgaaatggtgagtgctgatgcagtaaaatttaaatttattcaagattcagtaattccagcttcaggaacaattgatgttgtggttgaatgtgaagtttatggtactaaaggaaatgttccaataggagcgattaggtttttccctaagacattacaaggcttgcaaatagtcactaataaaacagcattcacaaatggttatgatggtgaagaagatccagaattaaaagaaagattctttgaaaaagttcaggaaccagctactagtggaaatgaagctgagtataaggcctgggcaaaatcaattgttggtgtttcagatgcaagaataattcctatttgggataaaagtaatggtaaaaatggtgctggaacagtaaaagttatactactaaattctgataaacgagcagcagaccaaacattaattaacagtgtaaagacatatatagaaagtgttaggccagtaggtgccactgttacagtagtaagtgctatagaattatcaattaatgttagtgcaactttgatattagctcctgggcagattctagataatgtaaaaaaggttattgaaactaatattacaaattatttaaagactatagcttttaaacagagctttgtaagttatggtgctattgcatcagtagtttttaatagtgaaggtgttacagattatagcggattactaattaatgatggaatttcaaatatacctatagcagatactgaagttgctgttttagggagcgtgttagtttaatggataaagaacaattaatctcaaatatgcctgactactatgaaaattctgacttgatggccaatatactaaatgcatatacaaaacaatttgcaaagctgaaagaaaaatatgataaggctaataatcaattatcttatcatactgcagatacagacttatacagatttgaagaagactttggaataattacagatcctaatagaactttagaagaaagacgagcaaaaatattagcaaaattaagaggtcaaggaactgtaactatagctgctcttaaggcacttgcagaaagctatgtaaatcaagctgaaataattgagcacaattcagattattcatttgatgtaatattaaaaactaaaacaagtttagagagatatatagaagatttaataagtcaaatagaaagcagcaagccctgtcatttggactataagcttataattgattactttactattttagtaattcatattaattttgcaagatatgagtctgaaaaattaacaccatgcggaactattgatgtttcatgtaatcctaggattgcaactgatggtagaaaatatggtgatgcacttattgaaaagataaaagaatatttttcaaaatctcttttatttgcttcacaagaaacttatccaaatggatccttaggcaagagcttcaatgaaaagatatctgattttaaaaaattctatttttcaaagacattagatgttgcatctgaaaatacagtaatgcattttactaatggacttaggaaaaatgaaataattgcagataatatttacaagtatagctctactaaatttgaagttacatccgatagcaagtttatttatatgacaaatggtttaagtataaatgagactataacagataaatattcagctaatctatctgaagcatttagagttgcaataggtactgaaggcttaagagcaaatgaacaaattattgataagtgctcaaggtatttatcaactaatatattacattgttctaatgaagtttactgtggaggaggtgtatattcatgataaaaccagatggactgaatttaatttacaatagcataacttcaaatcttttaaaaggtcaggcacttatagatggtcaatataaagatattgagattcaaaagactgagctaacttcaaactcagttaaagtctttctatatttagatgaatctttcgtaggtcaaataaccaattatagacttataactatagctggaaaagtctttttagaaagaagtgagaatattgctaagaataatacaaagggattattggttctctttgaaattgtattacaggagggataataaatggctgattattcaaaaactacatggtatgaccaagtaacagaccagaatggaaatgtaattcaagccggaacaccattgtcagcaactaatatgaatcgtatggaatcaggtattgaccttgcggataatgttgttggtgttatagttgctgaagcacttcaaaagataaatggaataaataaagagttagaaaaatggcaaaaacaaagattacaacaaggggaagtatatttatataataaatatgttattaacggttgcgttattagtaaaatgtctaatagtagatatcttcaaattagtttaactggaacgtttactgcaggtaatgtatcaaaggtatctgtagatggtaaatatgccggaatagtagatgaacaaatgattgctatggttccaatgaatactgattcaataactgatatttattatttgtatattgactatgattctgtacaaggtagatatagaagctatttagcggctactgttccagatggtaagcttacattatacaagataactgtacctgcaaatgatactggtatggatcttacttcggtaactttgactgatatgagaagaatagaagcgcttaatacaataaggactacagagccatatgtattagttagcataccaggttttccaatgttagatgcaggagattatgatgtcaatgtaactgttgaatcagcaagtgatgtgatgtcagttggagaaataatagtatatgacaagcaggcaaatggatttaaactaaaaattacaggtagtgctgataatactcaaataagatggactctaatgaatccagatattaaataaggaggcttaatatattatgaaaataagtgaacaaaatgaaggaaaaaagattagctatactgtaacaggttcaactatagtttttgatgaaactataagtgttaatgtggcaaggtatcaaaaagatcaggagaatgttatagatgtgtgtttagattcagatatgcagctaacaacaggtttaggtaaatggtatgttgcaaatattattattccgccaagaacttataaaatggtggatacaggaactaaagatgataaagataatgagatatttgaaagagtggcggattcgttaaatatggatgaagtcactcttattttatggacattaccacaaaactacgaaatgttaacaggaggtgctaattaatatggcatttatttatagtgtaaaagatacttatagagcagcagttgaggcggcaacaggagggaaaaatacagttctttatgatgatcaagggaatccatcaattatggttgtaattccaaagttctatcttgatgatgttataactggagctccacatacagttcatccagcttttatagttaatggagttgaaaaaccttatatctatatttcaaagtatcaaaatatagtccaaaatagtagagcttattcattaccaggtcaagaccctgcaacatatgttaactttgaccaagctctttcatattgttatgctaaaggacaaggttggcatctaatgtcaagggcagaatgggctgcaatagcattatggtgtaagaaaaatggttttatgcctcgtggaaataataactatggatgtgatacatcagcttcatatgaaaaaggaagagaaacttattacgatagtggagcaggtaaaacaggaagagttgcaacaggaagtgggccagcaagttggtcacatgatggaactccagatggaatctatgatcttaacggaaatgtgtgggaatggaattctggtatgagattaaagaacggtgaaattcaagtcattcaggacaataatgctgctatattaaattctgatcattctgatacatcaacattgtggaaagcaatagcttcggcagatggttcgttagtagcacctggaacagcgaatactcttaaatttaatagtgatgtagtgggcaacagtaatcaaactggcggtagaattggaaatcctgttttagatacaatcagagataagcctgcttatactggaggagaatcaaatgaatattatgcagaacttaatagaacttttgaaactttagctgctgcttcaggagtaactgcaccaacactactaaaagcgttagggatatttccaatcgactcttcatgcggtggagatatgttgtatataaggaattatggggaaagaattccattttctggtggcacttggggcaatggctccggcgctggccttttcgccctctatgattaccgtagtttagttcatgtggggttccgcgcggcgtacgtcttgtaattcggtcgctgtgttctgattgggctacgatagtagccctttaaaaaattttgatatcaagaaatgatatattataactaaaataaaaatagaataacaaaatatgataaaattctgaaatggtgatacgaatggcaacggaagatttaataatccttcaaaaaacatatgatatgataaattatggctatcaagcaatagcacaatttccgaagagtgaaaaatatgctcttggaacagatatgaaaaaatgtatgcatcaaattttggagtatacaatagtagctcataaaaaatattataaaaaaactacacttcaggaattggatgtggaagtaacaaagttaaaagcttacactaggttggcaaaagacttaggttttcttccgttcaaaaaatatgaagtttggtcaggatataatgttgaaataggtaagatggttggtggatggattaaatctgctaaacaataaattaccttgggaatagaccgtagcgtgtgtaggtggcaattggggcaatggctccggcgctggccttttcgccctcaatatgaataataaccgtagtaatagtaacaacaatgtggggttccgcgcggctctactcttgtggtcagcagtaataagctcaagggcttatttccagtacaaagagacgtaaaggggtctatttccacacctattggtgaaaaatatattagctgtgaatgccgagagtaatccattgatttggatgaaatccgcaaagcatggcatatttaaatggagtaatactaatggcaaaacaaattaaaaatgtttatccagagctatgtagttatgaaaatctatatcaagcttatttggaagctagaaaagggaagagattcagagatgagatactgcagttttcttttaatattgaagagtatttattggagctaagagatgaattaataaatcacacttatacagttggtggttatagagaattttttatatatgaacctaagaaacgtcttataatggctttaccttttaaagatagagttgttcaatgggctatatatcagcttattaatcctatatttgataaaggatatatatttgatagttatggttgcagaaacaacaaaggcactcttaaggctgtacagaggttatattattggcttaaattagtaggaaaaaaagaaaagaaatactactatttaaagcttgatatgagtaaatatttctatagaatagaccataaggtaataattgaattattacgagctaaaatagctgacaaggagcttttgtggctcttagaaactatcataaattatgatgaagttgcctttgggttaaagttaaatggtaatgtagatgatccagcagacagattaaaaggtaaaggaatgcctataggaaatttaacaagtcaaatgtttgctaatttatatcttaatgaattagatcagtactgcaagcggcaattaggaattaaatactatgtcagatatatggatgatgtaataattttagctgatgataagaaaaagcttcatgaatataaatcattaattgaagaatttataggtaataaattaaacttaaatttaaataataaaactgcaattagacctattgctttgggtgtagaatttgttggctataaagtattcccaactcatctaaaggtaagaaaatcaacatcacttaagatgaaacgtaggcttaaatacgtgaagaaacaatatgaaagagataatataccttttgataaagtaaatgcaactgtgcaaagctatatgggtatcttaaagcattgcaatagttattcattgcaaagagcagtatttagtaattatatacttcgaaaagaatagtatttgatataatatatcaaaattaaatagagtattcaggattatgctagaatttacttataaataaattctagttttcttagaaagcagcttaaatcatatcgaaaggtgatacaatgtatcgcttttttgatattatatatcaaaataaacacgaaaatacctagtagcgatacaattcccttaaaaattgatatttgaagggattggttgaatggtaaaaattcatttatctaagatactaggagaaaaaaggtggacacaggctgatttagctagaaaaacaggcataagaccaaatactatttcagagttatataatgaactggtagatagagtgagtttagagcaattagataaaatatgtgaagttttagagtgtgatcttaatgatttattagaatatataccaaataaaaagagataagggagaagagcctaattaagtttagagctctttttcttatgtcaaaattaaatcaggaggtgggttatgaatggtaaatgtatttctatcccaaaaaactttggaacagatgaagttaatgaatttagaaaaaacttaaatgatttaataaagaaaggtgaaagaaattttattatagattttagtgaatgtgcgtttatagatgttacaggccttggagtattaatatatataaacaatagatgcacgaaattaaatggtagttttaagctttctggaattaatccaagtattatagaaatttttaaacttactagattagataagattttagagagaaattgatttaaggaagtgacatatggaattaatattacaaacaggattattaagattattacctaaacctataacttacatgttattgttttactttgcatgtaagttttttgattttgcaagtggaatattaaagtgttgcaaaagtggaggtactggctataagagttcaaaaatgcgtgatggaataattacctggattggagaattaattgcaatattatttgttcttggcctggatctgttgttaggtttaaattttatactatgcggggctacattatctctttttatatttaaagagggtggcagtatattagagaatttagcacagtgtggagtagaactgccggatgcagtaaaagaaagattagaaatatttaatactaaaaaaaatgatgagttaccaataaataaagagtagtcaatggctgctcttttaaattacaaaaaataagaaaaggtggaatgtaaaatgaaagaaatattaattaatcaagtggctccagtagcagctacagcagtagtagcaattttagtagcaataataaaatctgttggagatgttgctattgatgtgttgaaaaagaaaaaagaagaaatagaacaaaagattaaggcttccgggcatgaagaggagctaaacacagcaaaggaagtgtggaacattatagaagaaaaatacaggattacagaaaatgcaagtcaagtgttagaatccaaggcagatgaatttgataaactgttacttcaaagaatacctggtctatctcaacaaaatttatctgatttaagacaagctatagcaggagaagtgaacaaaggcaaagcagctgtaactcaagataatacagcacaacaaattgcagatttgaaacaagctaatgctactttacaatcagaaaatctaagtttaaaatctacaattactcaaataaatagtgcacttcaaccagtagcaacaaataattctgcaactcaaaatggttcaatacaagtttaatttttagagtagcctaagtggttactctttactcttattaaattcaagaaagaaggatgttaaatgtatgattttttaatagcagtaggacatactgcaagtggtaatgcaggttgtggagcagtagataatttagatgaaagtaactgcaccagacagatagcacctttaacagttaactatttagaaagcgcagggaagagtgtcggattgttaagaatcgatagaggaaatacttataattgtgaagattgctacactagagcagatcaagcgaataatttaggggctgaatggtatgttgaaattcatttgaattcaggtaaggagcatactggggatggtgcagaagtctgcatttgttctagcaatcctgaagtgcaagctatggcagagagagtatctgaaagtgtggccaatgcactatctatagataatagaggtgtaaaaaaagaaaatcttatagtattaaagagaacttacatgaaagctattttagttgagtgtatgttcgttgatggtgatgatcctaacagatataatgcagataatatagctagagctatagcggagggattattaggggctactattgaagtagaatggaagcaaggttggaatcaaagaggcagcagatggttctattgcactgatgttaataataaatactactataaatcaagttggcagtatattgagaattattggtacttatttgactgtgatggttggtgtgttactggctggaaggaatacaatggtatatggtattatttagatccagcatcttgccaaatggccattggttggaagcaaatatcaggagagtggtattattttaataatactggtgcaatgcaaacaggttggataaaagataaagacaaggattattatctttactctgatggtcctatgacacatgattgtgatttatatggatatagatttgcatcagatggcgctgcaactaaattaagttaatcagtattaaaatatgatataatacatttggctaaattgcacaaatactagccattaagaggtggattaggtagaaatacttaatctgcctctattttttttgccttaaaatagacttaattaatttgtttgacaaaaataccaaataatatacaattatagtatgaaagtttaagggggagtaataaatgtcaaaaatggtaaattgcaagacttgtggaaaagaaatagctaaaagtgctaaagcgtgtccaggctgtggggcaaagaataaaaaaccattttatttaagatggtggtttatacttatagtcttaatagtaattataatagcagcatctagtggaagtaagaaaaatgataattcaaaggatactgcatcaagttcaactgcaacaactacagacacttctaaagatacatctgaatcacatgccagccaagataaagcaaaagatactgcaaaggatacaaaagataatatacctaaggaatatcaatcagcattaaaaaaagcagatacttatgctaaccaaatgaatttatctaaaaaaggtttatatgagcaattaacatcagatgctggagaaaaatttcctaaagaagctgcacagtatgctgtagataatgtaaaagcagattggaaaaagaatgcattagctaaagctaaaacatatcaaaatgaaatgagtatgtctaagagtgctatacacgaccaactagtatcagatgctggagaaaaatttactgaagaagaagcacaatacgctataaataatttagaaaattagaaacaataaaagcaggggagaacgttattaactactccttgcctctattcttttatagagtggggattgtatcgataaaagatgatgattaaagctaggattaaaattcctagctttttttatgtaaaaatattacaatattactagaggtggtattgtgggtgttaaaaataaacttaaaaagatacggatgaaggaatatggaatagatagcaagagtgagtttgcaagaatgctagaagtaccagtacaaacatatataaaatgggagaacggagaatcttgtcctaatcttaatttagcaattacaatagctaaaaaattaaataaaacagtagaagatatatggtaccaataataggtatcatattttttttattattttttagaaattatttataaaatttataaataattagtattttttagaaataaattacatacatatataacaaaggattaagaaaaggagctaaaatttatgaaaaattactcaattttaggtatagacataggaaattcaacttgtgagagtaatacaggcgttatatataattcaaaaatcactaacgttgaacctttaagtaaagctgataccttactaatagataagaaaacctactggttaggcgaggggaattatgatactacctataggaaagttgataaagagaattatattaatttcttattcggaactttagcacttagtacagatacgattaataattatatagttttaggattaccactaagtcagtataaggaagacaaagcatcattaataaatatggttttggccaataaagaaaaaacaataagaattaatgatgtagaaaagcaaataagcatagaagatgttgaaatattcccagaaggtgtagtgaccttgccagatgattatgagggaatttgtatagatatcggaggaagaacaacagattgtgctctagttgttaatgaaagaggtagaaggagaatattgaatccaataagtgtaccatcaggaactattaacttatacaaggattttattaatagaataaacaataaattgagtttagatctagttatgaatgatgcagaaagaataatgaatactggtctgattttagatggaagaaagacaaatatagattttgcattggaagtatacaagcaatttgtagacaaccttattagtcaattacaagttgaatattctttaagaaccaatcgtattagtcttactgggggtggcgctacactactatataatcagattaaagatagactaggcgaaggcgttacaattcaagaaaatcctatttttgcaaatgcaaatgcttattatgaattggggtgttcaatttggcagtagtaaaagcagtaagtttcaaagccagagaacaaaaccttgtagattttataggagatagggatttttcttactatgtaaaagaattaataaaaaaagatatgaaaaaagaaaaatcaagtgagccaccaaataaaattgaaaaagtagctccaaagaagaggaatgttaattttgatatataaaaatagcctacttgacgggaaagtagactatccttatggacaatttataatataaatttatgcaagcacatttaataatatgcatgttttcactaattattaacaattactttgcaaattagagataaaatgcccagagtaactaaagtgtaaccacagccaacccaaattttatttaaaacattcatcatattcattatcctttcttgaatggttttagtttatattatgttcatgtttttagaaattatgcaggaggattgtaatgtctaaatatttaaatgagatatggaatacttgtacaagctggatagccaatgtaactgatagtgcaataggaaatggacttgtatttgctggtacaaaattagaaacaatagcatcaattctaatagtagttggaatgttgttgtggatttttagaaatacaaaagtatttagatatggtttgatatcatactttataggcttattgattgaattaattggtttagcaatgattaaataaaagaggtgcagtatggaaataagtattatattagataatcaggttgtttattcaaaagagtttaaaaattatttaagaaaattaaaatataagaggccagatcataataaaatgcttgaaatggaaagtaaatttattgattttttagaaaatgataaccatgctaaatatatatattctgctgtaacaggagtaacaatagcagcttgtaatacgtctatggtttatgctaaagattatagtaatatagctgataaaatgaaagaagggctaaatcctattattgaacttttggcaggattggggtatccgttaacttatgcaatgttaatcgtaggtgctataatgataattactggaaagaaatcaaagggtctagatgtaattaagtgggcgtgtattgggtatataggattgcaatttattccgttcctattaaatttgctagctgatataggcagagaaatgaggaagatgtaatcatgaggggacttaaaataataccacatagcacaatggataatactaacataaaagatattgtaaaagcattgcatgagcctaagagatatacagaaagatataatttttcatgtgtagataagctcctggaagaaggaaagccaatacctattaaagatgcactaaaactaggcacaataaaaaaattactagacccaaaggaagaaaatacagatttattaattcttcaaaacaattttatatatgaaattcaaatcactaaagacaatatagaatttctactattaaatagggatttggaaaaagttaaaaaagtttatagcaagtacattgataagatcaaatttagtgataatattatagattataaaatacccataaaaaatgatatgagcgttgcagaaatgagtaataaagaacattttatgttttctcttaaaactacatctagagcattagaaccattaaaatacattctggatttaaaaaggattttaaaagaagatgaaatgttcatctatcaggttgttatagagccattaaatactgattggtggagtaattacactaaagcttataaaaacttcaaagaagggaagatgcctaaaaaatttcagttaaagcctaaagatatatttaatttagctggcaatttaactttagatataagtttagaattattatattgttttgaagaagttattctcggtccagatggagtagaaaaaatagatacaactgatgatgatgtaagcataataaagagagaaagaggactttcaaactccactactagaaaaggaacagaaaaaggctttgaaactgcaatcagaggtatagtttattcaaaatctgaaagtaggagagagtttttactagatcagtttaagaactgctttggatgtatggatttagataatagtttagttatgagaaaaattaaaaatacaaaagaaaatatgaagaggattaaaaatagagaattattttggcatccacttaatgattcaaaatttattcttggagtttcggagcttgaacatttcttacaattaccacaagtttcactacagaaagaacttggcatggaaagattagattttgcagaaataaaactagcaaaagaattattagaaggatatattcctataggacatatatatggtggtaaaggaattgcctattggagtaagataaaggatttattatgtcttagtaaagcaatagtagctgtaaagggagcaggaaagagtaaatactttgaaaattatgtgtacaatgcttacaaaggtggagattgcattatttattttgactatatagaaaataatcagaatgcttgggaagtagcaaaacacatacctaaaaatgatgttattacattagatttaagcaaaggattcacatttgattacccagaactagatatttcaacaattcctaaagatgaagaatataatcgtaatgttaagaggtttgccagtgattactgcatgcttatggagaaattcatcaatacaataaatactggtgatgcacagccacttactgcaaatatgagaaatattttaatagctgcttgtagtttaacttttttagctggatttacagatatgtattctatatataaagttcttactaattatagattcagatatacagtggttgaaaaagtgaaagagatgaaaatttacaatgatgatgattttagatttgaagttatgaaatcgttagatgaagtgaaagaaaccaaaggtacaaagaaaactattcaagttgttggaactaatgataaagctgatagagtgttagacagatttaatgcactattaagggatagcaggactgaggaaatgcttttaggtatagatagaaacaatgttaattttgttgatatatttgaacaaaataaagttgtattagttttaatgtcagaggattattttacagactatgaacttaaggatatagtaatgacttactttttatctagaatgaaattagctggccaaaagagagctgcacttattaaagatagagaaaaaagaaaagtagttcacatcatgttagatgaaatacatcaattagataatagtacaagtcttatgattaagaacatagcagaggataggaaatttagaacaacatatgtattcacatgccaattcttaaagcagttcggtaagctttgggatgcagtaaaaggaactggatgtaacttcatgttattagctggatgtgagaaggagaatttcacattattaaaagaagaaataggatctaactttgaattaaatgatttgataaaaatgcctgcatggcatagtctaaatattattagaggaagagaaaaaaccattcaagcttttttaagccatttaccaccagaattaaaatagaactagggtattaatcctagttccttttggtagattggatttatagtatttttaattcttcaagtttataataattttccctagttagttcatattttcctttttcccaacaggaccatgtataaggtgcaacattaattaatgaagctgcatcttgtatatttagattattatcagttctataatttactaatatggtaccaattgattcaagtatctcaaaataaggatcgtaaaagtatttagtaggaagattaaaatatattgataattttctagacatctctttatttggatatatattatgtatttctgaatttgtaatataatttgcatattttataccaattcttttagcaagagtagcctgcgatatattttcttttaatctatgatatcttaaccaatagcttatagttgttgaatgagaattagtatttaattttgatacttcatgatttaatatataaattatatattctttccaaaaagtcgcacttttatacactaaggtcaaggtttgttaatgatagaaaggctatagttaataagaaattaaaaaatatgccgctagaggaattggttagaactcaatatgaaaaatctctaagtaaagtacctcatattgatggggagagtaagagagattataggatgagggaagtgtcatatctaaatctaaaatggttcatggttcagcttcttacaagaaaagataggactagtatgtataatggcctagaagcaagggttccatttgcagatattagattggttgactatgcgtttaacttaccagcggatgtaaaattatataaaggcagagaaaaaggattattaagagcagcctttgaaggaatattgccaaatgatattatatatagaaagaagagtccatatcctaagacacataatccagtttatacagatattgtatgtaagatgataactgagattttggataaaaaatcttcgccaattcatgaaattattgatgaaaaagtagttcgagagataatactcacaaaaggagaatcatataaagctccatggtatgggcagctaatgactggaccacaattacttgctttcttaattcaagtaaatatttggcttgaagaatataatgttaatttactaatttaattttcaattcacagttcacaatgcacaattatggggaaaactcctttggagttttaaaaatatatatctaaaaatttaatccttaattgtgcattgtaaattgtgcattaaaaaaagttctgccttccagcagaactttttcttatatatatttaaattttacagatatttctttaatttcaccttttgaattttttctaattgaaaattgttttatgtctttaaaatcattttctaattggtaagttagttctgtaatagtagctttagctttcttagttaacccaccatcttcaataatttcaaatcttgattttctgcaagttgtttcatcatttttatcatcaataattacataatattcaggtgcttcttctatgaccacatattctttatttaaagttaaagttgaacaaagatcattatctatacattttattatcattttaatacctcctaaatcccttttatatgatagattgtactatagatattgtcttgtttcaactataattagaaagataaaaaaagtttgtcaatattcataaaaaatgagcattaaaatattgtaataaatgtaatattttaattaccgaatacctatctatgatatttaattaacttaaatatttcattaagtaaaaatggtattaaagagatacatattactagaagccaatctcgggcacttaaaataaatacattaaatacatcagcgaagaatggaattataattattaaaaattgaatgcatataccaagtaaaattgataataacaaatacttgtttgtgaatactccaagctttaaaagtgatttttctctgcttcgcattgagagtgaaaaaaataattgggagaaacttaaaaccacaaaagctaaagtttgagcgtgaactaaggagctcatatataatctttcaccaagaagaaaagcagccaatgtcacaccaccaattagcacgccatttaagcctaagaataaacccatgtgttctgcaaaaagtgattcttttggatttctaggtggatgctccattacgcttgaatcctttggatctataccaagagaaagagcaggaaaactatctgttattaaattcacccataaaatatgaattggtaataatggtggatcaaaatttaatagaatagctacaaacaaagaaactatttcacccaagttacaggataataagaatattatagcttttcttatatttgcataaatatttcttccttcctctacagcttttactattgtagtaaagttgtcgtcagttaaaatcatatcagcagcacctttagcgacatcagtccccgttatacccatagcaacacctatatcagcagcctttaaagatggggcatcgttaacaccatcgcctgtcatagatacaatgttcccatggaatttaaatgcttttacaatcttaaccttattttctggagaaactctagcaaatactttataattgttaactattttattaaattcttcatcgctatagctatcaatttcggcaccagtcatgcactcatttatattatttgcaattccaagttcgcttgcaatcgcaaaagcagtgtttttatgatctccagttatcataataggagttattccagcttgtttgcataaagcaattgatggcttaacttcttctctaggaggatctatcattcccattaatcctacaaaaattaaatctttttcaagggaatctatgctgacgctttcatcctttatgtctttatagcttaaaccgaggacccgtaaggcttcgtcagacattaaattagatatctttaatatttcatcctttttttcttgtgtaaaatcaattatttctccatttaataagattttatttgaaagtttgagtaaattatcaatagctccttttgtgaagactttaaaatgtgaatcgtatttatttactgtagtcatgagctttctatcagagtcaaaaggaatttcatcaactcttgagtgatctgtgcttaaatcttctttatataagtcatacttgattccagcatcaagcaaagcaatttcagtaggatcccctgttttactaccatcttttgaagtagcatcattgcataaaatcattccctcaaacaacaatttggtatcattatcacctagatcgcaattatcaatagatacaagtttattatttatacagcatttttttattgtcattacatttaaagttaaggttccagttttgtcagagcatatgatattaacagatcctaaagtttcaacggctggaagtttttttactatagaattttgttttatcattcgctgtacacccattgctagtactattgcaacaattgctggaaggccctcaggaattgcagcaacagctaagcttatagctgtcaaaagcatttcgaaccaatctcgtccttgaaacatcgatatgacaaagatcaatatacaaatacctacagctccaaagcctaaagtttttccaagagatgcaagtcttcgttgcaagggggtagtattatcctcttctttatttagcatatcagctatttttcctatttgtgtattcattccagtatttacaacaacaccagttccgcgtccgtaagtcactagagtggacatgaatgccatgtttatcatatcacctataggaatgttgctatttgtaagtgtgacattactatctttctcagcagggacagattcaccagtaaatgctgattcatctatttttaaattggcactttcaattaatcgtaaatcagcagggagataccttccagcatctagtataataatgtcgcctacaacaacctcttcagaaggtatttcttttataataccatctctcttaactatggcttttggagtagatagtttttttaatgcttcgagcgatttttctgccttagattcttgaaaaacccctattaaagcatttattaaaattacaagcagtatgacgattgtatcactatattcgtgcataaatgcagaaataattgctgcaactaaaagtatataaatcataacatcgtttatttgggataagaatagctgccaaaggctctttttcctttgagaagctaatttgttttctccatatttctcaaggcgctcttttgcctctgattcagaaaggccaacatcaggattgacatttaatttttgtaaaatttcttgggaaggtgtgtcaaaccacatggataacatcactccattcataatttaatatatacatatatatattaaagatttaatgaatttatatacatgggaaaaaatgaaatatacatatcaaaatcaaatattaagtagagaaagtaactagattttgatataattaattaaatatatatattgcaaaaataattcttcatcataattctaaaaatattgcaagaattttggctataattgtgaattgcagcatatatacatatagaaagtaattagttatatttagagttttaaacttttagataaacttcatttttgagttaggaaaggattgaatatacatggagattggtagagtgcgaagagggactgtaacttccgagagaaaaattatttctgaaaaaaaagatttttctcaaagttttagtcaggaaaggcataaaaagtcagaagaacagctcaaaaaaatgatagatgacataaaaaaaaggggtaacagactagtaactactaagacttatgttgatgtagttatgtacaagaagatgataaaagaatatctagaatcaatactaaagttcatgtatgagactaaaaaagatattagcttttggcagactcagtatttcgtaacggttgatactgttgatgggaaacttgaagaattaacaaaagcactcctttctgatgaaaaagataatataaatatagcgtcaacaattgatgaaattcaagggatgattgttgatatatatagataataaatgatatacgtgttgcaataacatattcacatttacaaggctattaagttgagtgttcaatcaagataggaatgtggaaatctaatttcagtaagtatataaatgtatattttttataaatagaaatatattagaacatgtttaataattattctacatgttcttttgtcgtttttaatctttattgaaattatatatggataccctaattaagacctgaacttatgcatatgtctcgccgaaataaggattatgctattgttccagtttctaagggaattatgatggatgattctaagatcacaagttgcacccaagatgctagcctcaaaggcgagctttgaactagcatcttggaacaacttttaatctaagaatcaaaaccatcaaattcctaatgaaacatttcatattatgacccttgtggttacaaaagcataattcttatttctagttgagatatatttcatagtatcaatctaacttataatcggggcatctatatagatatccaatcaaaaattggagttattagatgaacatatttacaaggttgctagaactttaagttcatatattcaccagaaatcataaatatatttgtggagaaaacatttgaaaatgagctgctaagattcttagttgtagattgttccactttagcttgtcacactgaaagtgggagcatgccaaagtggtgaaatctgcggcttagaattttcagcgatattttcatagcttttcggaacaaaatatttatgatttcggcaagttatcacataaatatagttttaaagttgaatatccatacagatttggtatttcaattttaatatgttattataattaatagtgaatatcaattaattaatattactattaagtattttgctttaatgcttaattcagatattaatattttttagggggaattaaaatgaaaaaaaaggtatcattatttttaatcatgatattgtgtgtttttacatttgcaggttgtgacagtagctcaaatcaaagcaaatctgaagataataagaaatcaacaaaagatattagctttgtaacaccagatgggcttacagctatagcagtagctaaacttataaaagaaaaaccggaaattaaatctggatacaatgttaattatactattgagcaaaactctgacagtttagttacaagcgttatgaagagtgagccagatattgcaattgtaccttcaaacgtagcagcaactgtgtttaacaagaataaggaatataaaatagcaggaacagttggatttggatcattttatataggaacaactaatcagaatcaaagtgttgaagatttaaaaggaaaagaagtttacaatattggaaagggattaacacctgacataattgcaaaaacaatacttaaagaaaaaggtattgatgtagataaagaaattaactttagttatgtgaatacagtaaatgaacttgcaccaataattttatctggaaaatcagaatatgcagtaattccagaaccagcgttatcaactgttcaaagtaaaaatgataagtttaatgtaatgctaaatttaaatgaagaatggaaaaaattaaatgattctcaatatggatatcctcaatcaacaattatagttaagaaggaattgttagaaaatgataaagaatttgtttcagaacttttaaagcaagttaaagattcagaagagtggatatataataataaagaaactactggagattattgcgaagaaataggagtttcagcaaagaagccaatagtagtgaaagctattgataggtcaaatataaaatatgtaggaataaaggattgttataaagaatatgaaacttattttaaaaaattaaatgaatttgatccaaaaacaatagggggaagtataccagatgatgaaatattcatggaaaagtagattctatactttgttatcatgtatatttttcatagggatatggcagctaattgcattaataataaataatgacatatatgtcccgagattagaacaagtgttagaagctattaagaatatttttagtaataaagattcgttaaagatcattttcagcagtttttacaggactatgactagttatgtattagctttgattttttcaatgattttaggggtgctcgcaatagtgtatccatttttcaagtatttaatggaacctgtaaattcatttagtaagacaattccaaccatggtgttagtagttctttcattagtatggtttgataaggatagtacaccatttgttgcgggatttgctatcatttttccaatcctttatgaaggtatacgaaataaccttttgcaaatagataaaaaaataatcgatatgacgaagatatatgaagtgagtctaaaaaacaagatcaaaaagatctatattccaactatgaaattttatttcatgagcatctttgtatcaacattttcattgacttttaaagttgtaattgcaggagaagtatacggtcagccaaagtttgggataggatcacagatacaggtagaaaaagttaattttaatactccagggatttttgcatggattgtaattattgtcattgtatctctagttttagagtttctaaataagttgttaaggaagagaacatataggtggtccaaatgaatataagtattaaaaatctaaataagtcatatggaactgagaaaatttttgaaaatttcaacatagatttttacgacgataagataaattgtataataggaaaatctgggtgtggaaagagtactctattagacattatagcaggtctaatagatgttcaaagtggagacataagcggcgtttcattaagtgatataagctatatattccaggaagataggttaattgagtggcttactgttaaagaaaacttggaaattgcattaaaaaggtatttcaaggattctgatttagagaatagaattgatgaagtattaaatttagttggaatttatgatacaaaaaacaaatatccaaatgcacttagcggaggaatgagacaaagagttaatatagcaagagcatttggaaagccatcaaaggtcattttaatggatgagccttttaaatctttagattataagttgaaatatgtcataattgatgaatttaaaaatttattagacaaagaaaaaagaatggttatattggttactcatgatctagatgaagctatatatttccgagggaatataatagtatttaacaatagaccagttaaaatagcaggaacattcagtgataatttagataaatgtaaggaagaaattttaaatataatataaaagttatatagtagggatgcactactagtacacatttctaattatatatacaaattttgcttccaactaaaacgaataagaaacttgctattacaaaactggaaatacccaaaaattttttatttgcatttaataaattaatgccaagcaatgtatcacaaagacccaagcaaataaagattaatggaaaaaaataatctggatcagatttacttgctatgatatttaatgagaataaaggcaatagaattgctaagcagaagcttacaaaataaaatagctttttcataaaagttattcaccaccttacaattggaaaattatgtattatattaaagtatatacaagccatatgaattttattcattagaggaaggagattataaatgataagaaaatttatttcattttataagccgtataaattattatttattttagatttagtagtagcacttatcgcatctttatgcgatttagtatatccagttatgacaagggatcttgtgaatgaatcgattcctaataaagatttaaggacaattattgtatttgccatagcattacttataatttttggaatcaaggctgcatgtggttacttcatgcagtattgggggcatgttgtaggtgttagaatgcagggggatatgagaagacatatatttaagcatcttcaaaaattacctaatagtttttttgataataataaaacaggtgatataatgtctagaattattaatgacttaatggatatttcagagcttgctcatcatgggccagaagatttatttatatcaatagttatgcttataggttcatttataatattgtgtacaatcaatatacctcttacagttttaatatttgcattcataccatttatagtatggtttactttatatgagagaaagaagatgaataaagcgtttcttgaaactaaagtagaaacaggagcagtcaatgcaaatcttgaaaatagtatttcaggaataaaaatatcaaaagcatttgtaagccatgaagctgaagaagaaaaatttgaaaaaggaaataaaaagttcattaatgccagagaaagagcatacaaagtaatggcggaatattcttccggtgcaggatttggaatggacgtgctaagttacgtaggtttaataggaggaggaatatttacacttattggacttataaacattggggattttatggcatatatgctgtttataaaaatctttatgactccaataaagaaacttattgattttatggagcaatttcaaaatggaattacaggtttccaaagatatatagaaataatgagtcaagataaagaaaaagataaagcaaatgcaactgaacttgaaaatgttcaaggggaaatagaatttaaagatgttaattttagctatgaaggtaaagaagttttaaaaaatatttctatcaaaataaataaaggaaagatgttagcattagtaggagcttctggtggaggtaaaacaacattttgtaatcttatcccaagattttatgaagtcgatagtggagatattttaatagataataagagcatttatgatgtcaaattagattctcttagagaaaatattggaatagttcaacaagaagttttcttatttacaggaacaataagagataatatactgtttggaaagacagatgcaactgaagaagaattactaagagctgctaagatggctaatattcatgaatttataaatacattacctgaaggatatgatacttacattggtgaaagaggtgttaaattatctggtgggcaaaagcagcgtatttccattgccagagtttttcttaaaaatcctccgatattgattttggatgaggcaacatcagcattagataatgcaacagaacgcataattcaagaatccctagaaaagttatgtgcaggaaggacaaccatagtagttgcacatagattgtctacaattaagaacgcagatgaaattattgtacttggaaaaacaggtataatagaagcaggaacccatgaagaattaatggaaaaacaaggagagtatagtaatttacatagactagcagcagtgtaaactttagataaaagaaggttgccaaaaaccatatgttttggcaacctcttattgtatttaagaataccacaagtttgacttgtggttccggaaagcttttagctataagtagaaaaaaataaacctccgttgtaaaattatagtaggtttgccgaccacaactataaagtacaaggaggtgtgtccgttaatggacattgatagtttagcacatagtaagtggaattgtaaatatcacatagtttttgcacccaaatttaggagacaagttatatatgggcagataaaagctgatataggaagaatacttagattattatgtgaaagaaagggagtagagattatagaagctaatgcatgtccagatcacatacatatgcttgtaagtataccgcctaaattaagcgtagcgcaatttatgggatatctgaagggcaagagttctttgatgatttttgataaacatgcaaacatgaaatataagtatggcaataggcaattttggtgtaaaggatattatgttgatacagtaggaagaaataagaaagtaatagaagagtatataaaaaatcaaatacaggaagatatagcttatgaacaaatgagtttgaaggaatatatcgacccgtttacgggtgagccggtaaataaaggcaagaaataaagcaccttttaggtgcagccggaaaaggttttgcggtcggcagaccatttcaacgtgcgagtagcacggccagtaacaaagccttacaggcgcagagcaagccacccgttttcacgggtggtcatgactagttattagattcattttttaatgaatttagtaattgaacttttttatatatagtagatacatccacctcaacatccatagcttgagcaagtttgttatgcaattcagtttgagcgggattcttatcgctagtttcagaatcttttattttattattgaattttgcctgaaccaacctagagttttcttcacttttcaatcttgccatattttctaattcattggaaaaagacgcttggctgtcatttgatgatgattgtgaagctgatgaatgcaaagtattatcaaaagatttagcattgttttgttttttattggaaggatttctagggttagtatacggcctctttattattttattatcaatagcagcaccagatacactagccacaatatattcacttctagaaattattctgttatcactcatataatatcccctccctaaaattataaattcggcttcaatattagtatcaatatattacttatatattcgtatatctactagaaaagtttactaaatattctataatataatgtatatttatttgattaatataatataacgaaagagtaaaatatatgcgggaataacaagtttatgttcagtattatgaacttaaagaataaaaggttcaatctcaattgacagatatgatatatatatgtgaattatatgatttattctttataaagttatttagtttaaattaactgatagtttaagataaagtttaatcaattaaaccttttagaagatttatagataacacaattattgcttacttatactttgaaatatatctaaactagaaagcagaaacatttttatctagcaggcatttgaaaatgagctattaaaagatcttaattgtaggttgttcaactaatgcttgtcacaataaaattgggagcaagcattagtggtgcaacctgcaatttagaactttcagcgaaattttcatagtcctgtgaaataacaatgtttctactttcggtggattagtgcataagtctaagttatatattgtttatctatagggagttattttaataaaatggaacttaattagagtataaaaaactagtatgaacttattttgggctaagttcatactagttttttaactttattttataaatattattctacttcgtatatccagccttctggagcttcaacatcaccaagttgaattcctaaaagtaagtcatataatttttgtgttataggaccaacttcagtttcgctaaagaatacatgtaatttatcgttgtgttgaattccaccaataggagttattactgcagcagtaccgcaagcaccagcttctttaaattgatctatttcatcaataaatacttctctttcataaacaggcatctttaaataatgttcagcaatgtaaagaagagatctttttgttatactaggtaaaatagatggtgatttaggagtaacaaattcatcatttttagttattccaaagaagtttgcagcacctatttcttctatttttgtgtgagtagctggatctagataaatacaatcagcaaatcctttttttacagcttcagcatgagcttgtaatgaagctgcatagttaccaccaactttatttccgccagtaccatgaggagcggctctatcaaagtcatctaaaactatataattgcaaggagatacgccatctttaaaataaggtcctactggtatacaaaatacaccgaaaatatattcaggagcaggtttaacgccaatattgttaccaactcccattaaatatggtctaatatatagagttgcaccacttccataaggtggtacatatttttcatttgcttttacaacttgtttaactgcatcgataaatttttcttttggaatatgtggcataagaagtttgtcacagctttcattcatacgatctgcatttaagtcaggtctaaataattgaattttaccttcttttgttgtatatgccttgagcccttcaaaacaactttggccataatgaataactgtagaagcttcacttatactaagcatattgtcttcaacaagttttccttcatcccattttccatctttccaaactgaaatataacgaagatctgtttttatgtaatcaaatcctaatttaccccagtctatatcagcttttttccccatttttatattcctccaaatctataaggcttattgccattgtttattattgttatttaataacatctattttagcactatccaaaaaaaaattccacacatttgaaaaaaagtacgcacctataaaaagagcacgaagtgcaatcaagaaactttcacatctaaaaaatgtgcgaagcgcaatcaagaacttttcacatttgaaaaaatgtccacgtcaaaaaaaccttaattaatctagtgatagattaattaaggtttttcatgaaatcatatatattttcatagtttttcggaacaaaaatatatatgatttcagctagctattcccaagctttagcatctgatggcatacgccagtcacctctaggacttaaagaaatacttccgactttaggtccatcaggaagagcacttcttttaaattgttgagtaaagaatctaaaaataaatttatcaagccatttttgtatttcctcatcagagtaatcatctttaaaagcagccttagctaaaaagaatattctctctttagttgagccatgtttaataaagtgatataagaagaaatcatgaagttcataaggacctacaatatcttcagttttttgagctatttcaccgttagcatctttaggtaataattctgggcttacaggtgtatctaatatatccataagaatatcacgtacaacttcagtagattcatgttgagctacatattgaaccaaatatcttacaagagtttttggaatagatggattcacagaatacattgacatatgatctccattatatgtacaccagccaagagcaagctctgataaatcaccagtacctattaagagtcctctttctttattagcaatatccattaaaatttgagttctttctcttgcttgaacattttcataagttacatcatgaatgtctttatcatgaccaatatcttcaaaatgttgaagagatgctttaactatatttatttctctaaggtctgtacctaattccttacataaattaatagcattattgtaagttctatcagtagtgccgaagccaggcatagtaatggttactatattctttttatcaataccaagtaattcaaaagtctttactattacaagtaatgctagcgtggaatccaaacctccagaaattccaactactgcttttttagagcctgtatgttctaatctctttgctaagccagcagcttgaatattaaatatttctttgcagcgaatttctctttctttttcataagaaggtacgaatggatgtttatctacaaatctatcaaatgtacttattgaaacatcactaaattcaaatttaattgtgttaggattcttattgataaacttagatgaatctctaaaactcaaatttttcattctttcagactttaatttgaatacatcaactatggaatagattacttcattttctctttgaaatctgtcattttcttttaataatgaaccattttcacttattaataaatgcccactaaataatacatctgtagtggattcatgaacaccagcagaagaatatatatagctgcagattgacctagcactttgatttgatattaggctttttctataatccattttgctaacaagctcatttgatgcagaaagatttcctattatatgagcgcccataagagaaaggtaagaacttggtgggattgttacccataagtcttcacaaatttcaactccaaagtttgcgatgcttgatgaaaaaattaagtttactccaaaaggaacatctttttggaatggtaaatccactctttcatcctcaactgaaagaccttcagtgaaccatcttttttcatagaattcactgtaatttggaagatatgacttaggaactattcctaaaacacttcccttaaatagtagaaaagcacaattgtataaagtacttccacagagaagaggtgcacctacagcaattaaagtatcatggtctttagtagattctaatatttcaaaaattccatctaaagctttgcttagtaagtattcttgtaaaaacaaatccccacaagtataagctgttaagcaaagttctgggaaaactatgaatttactttcattttttgctgcatcatctatgcactgtaaaatatttttaacattataatcaacatctgcaactctagttttagggcaagcagctgcgacttttataaaatccatttaatcactccttgcaattataaaatttaagtttttttattggtttataagatatagttctaatataattaaatacgttttaagtatattttgcttagtaaacataaacatatcctaataattatatactaacatgtttgtgaaatcaaaaaaagataaagggtataaaataactctttttaagttaataaatatcttgaaatattcataaatgtactgtataatataaaataagattacaaattcaagtatgtatgtaaaaattggacagtaaatcttagaactaatattataatgtttttaaggaggtaaattgtatgggggcagcagttttttggttagttatagctatatgcgtatttgcaatagatattttaactagtaatttttgttttacactattcgcagtaggtgctgtcgtagctgcagtgtgtggagtaatggaagtaccatttataactcaaataatagtattttctgtactgaatataatatcatttgcagttggatacccgttactcaagaaaaaatttaaagcagcaaacgaaagaataccacttatggaagaaacatatgtaggaaaaattatgataagcgaaaaagagattagagataaagcccaagttaaagttggtggagaatattggactgtaataaatgaaggcgatattattcacaaaggggataagtttactatcaaaggaatagaaggtataaaattaaaaattgaaaaggttcaggaggactagattatgagtgttattataattttaggagttatcttactattaatattaatagtagttatatcatcaattaaggttgtaaatacagggtatttatatgttgtagaaagatttggacaatttcatagagtgttggaaccaggactacattttattgtgccatttgtagattttgttagaagaaaggtttccacaaaacaacaaattttagatgtggagccacaatcggttataactaaagataatgttaaaatattagtagacaatgttatattttataaggtattgaatgcaagagatgcggtttataatattgaaagttatcaatcaggtattgtatattcggctacaactaatatgagaaatatattaggtaatatgtcattagatgaaattttatcaggaagagattcaataaatcaagatctattaagcattattgatgaagttactgatgcttatggtataaaaatactttcggttgaaattaaaaatatagttccaccagctgaaatccaacaagcaatggaaaaacaaatgaaagctgaaagagataagagagctatgattcttcaagcagaaggtttgagacaatctcaaatagaaaaagcagaaggagaaaaacaagctaaaattttatcagcagaagcagaaaagcaagcaaatataagaagagcagaaggtttaaaagaatctcagttactagaagcagaaggtaaagcaaaggctatagaacaaatagcgattgcagaatctcaagctataagaaaagtaaatcaagctattattgagtcgggaacaaatgaaactgttatagcattaaagcaagttgaagcacttaaagaaatggctaacagtccagcaaataagcttatattaccaaatgagactttatcatctcttggaagtatagctgcaattggagaaatgctaaaaggatcaggaaagaaataataaattaaatacaattaaaagagagcaagataattgctctcttttaagtagtgaaccaaaatcttcgattttgtgtgaatcagttaagcagacatctcgaatctatgattcgatgattgtcgattactctgtgagtacccagtgaacgaatgtgagtcgagtttcctttaagtagagaaccaaaatctttaattgtgtttgagataccgtttttggtggaattattatattatataagtaagttagttaaatggaatttatcattatagaagggattgggtacaactttacatggattatagggataaaagaaaagagagaatattaaatagtcaaatgaaaaagttaataaaaagagaagaaaagttcttttataaaaaagaaaatgaatatataaaaaataagatattacctgtaaaagagcaattagaagaaaaaatcccgaaaaatatgatagaaacttttgagaaagcatttgaaaagggattttattatgtttttgaaaaaggcactacagtaatagagaaaagttataactcagagaaaattaaaaatgaagcagatatagatgagtatattttatccaagcagatgaataacaaaaatttaagcagaatagataaaagagtaaaaaaaggtgtgcttataaataaaggaatcacagcagccgaagggacattacttggtatattaggaattggaataccggatatacccgtgtttattggagtaatattaaaaactgtgtatgagatttgtgtgaattatggatttgattataagtccaaaagtgaaaaggcatttatattaaatataatttgtgcaagttctataaaaacagatgaaaaaattctatactcaaatgaagtggatagaattgcatatagtattgaaaataatcatgatcttaaggttgatataaatgaattaattgagtcagcttcaaaatgtttatctgaaaatatagttgtatcaaaagttattcaagggataccgatagtaggagtatatggtggaatatcaaattatagattattagctgatataagcgaagtggcaagtataaaatataaaaaaagattattatctaaattgaaaaatacgctttagcttattagatggacttgttggtttgagtgtgcctcaatttcattattgaaagattagcaaaaaaatattaatatagactatgtagtataaaaacaaattgaggtgaagaaatgaaaaagaaaaatataatgagctttatacttttattaatactttctttttctttaattggttgtaatcttaaagatgattatatacttcaaacaaaagaagatacagatgaaaagccatctgcagataaggttaatgaagtttttgaatcagataagatgaaggaattaatggataaattaaagtctagccctaaggaaatttctgataaagttaatgaagttgatagtgatactacacgtgtaatgaaagaattaaatgataaagcagatgaattgacggatgagctcaataatgctgattttgaaggaaaaagtgaagatattaaaaataaatttgatgatatatctaataaattagatgaagttaaagataatgttgatgatgcgaaagatagagcagatacatttaaggatccaatcgataaaaagcaagtgacagatacagtggatgaatttacatcacatatgaataaccttgaaagagcaatcgatagaatagcaacaaccagataaaaatttatagttctaagtttttggcaggtataatgggctaatgcagctttcattatacctgttataatttagaatataaaaaacacttgattcttttgctttagtatgataaagtgataaatagaaagtgatgtagggggttattacatatgaaaataaatagtttaataaaaaaattaacagtagttgctatcatagctacattgggagtaagcttggttgcatgtggcgggaatgccaataaatcatcagaatcaaaggcaggaaaaagcgcattagataaggatgaattagtaataggcttagatgatacttttgttccaatgggatttaaaaatgagaacggggaaatagttggatttgatgttgatttagcaaatgcagtaggtaaaaaacttaacaaaaaggtgaaatttcaatcaattgattggagtatgaaagaaactgaacttaataacggtaatatagatttaatatggaatggatattcaattactgatgaaagaaaagaaaaagttgaattttcaaagccatatttaagtaatactcaagttatagtaacactagcagattctaatattaaatctaaaaatgatttagcaggtaaaaaagttggtgctcaaaatggatcaacagcagtagatgcagttgaagcagctaatggaattgaaaaaacttttgatggtggaaaacttgttacatttgaagataataacgcagcattaatggatttagaagcaaagagattagatgcaattgttgtagatgaaattttagcaagatattatatgaaagcaagaggacaagaaaaatataaaatcttagatgagaattttggaagtgaacaatacggtgttggaattaaaaaaggtgatactaaatttgtagaagcttttaacaaagctttagatgaagttatttctgatggaactgcagcagaaatatcaaagaaatggttcgaacaagatataattcttaaataatgcaaattagataatcataaatatttatacaaatagtttgaaaataaagaggaggaaataactttgagttatattttagagataatgcctcaagtattagagggattacaagttacattagaaatttttgtacttactttagtattatctattccactaggagtaataatcgctgtaatgaggacatctaaatctctaatacttaaacaaataagtggaatatatattcttataatgagaggcactcctctgttattgcaaattattgtaatcttctttggtcttcctctagtaggaataagctttgatagatttccagcagcaattttagcgtttactttaaattatggagcttattttggagaaatatttagagctggtatagagtctatagataatggacaagttgaaggggctaaggttctaggcttaagttctaaacaaacattttttagaataatacttccacaagcatttaaaacagtaataccaccagttgcaaatgaaataacaactttagtgaaggatacttcgttagtttatgtagttggtatggacgagctattaaagataggtaagactgctgctaatagagatgtttcgttggtaccacttttaatagttggtgttgtttacttaatagtaatagcaattttcagtcaagtattaaagaaaattgaagagaagtatgactattataaatagtgtggaggagattatatgcttaaagtaagtaatttgaaaaaaagattcggaaatacagaagttttaaaaggtgttaatcttcatataaaaaaaggtgaaatattagttgtcgttggaaattcaggtggtggaaagacaacattacttagatgcgtaaatgaattggaacattgtgatgaaggcgatatagaagttaacggaaaagttttatgtaaaaatggtaagtatgtagataaaaatgcgttaaaagaaataagaaaagatataggattagtatttcaaaatttcaacttatttccgcatatgagcgttttagaaaatcttattgaagcaccacaaaaggtgttaggatggtcaaaagaagaagcaataaagaaagcggaagaaactttaggtttcttagatttgttaggaaagaaaaataactatccatttgaattatctggtggtcaaaaacaaagagttgctattggaagagcattagtgcttgaacctaaaataatgtgctttgatgagccaacttctgcactagatccaggactaactggcgaagttgccaatttaataaagcgtttaagcgaaaaaggaatgagtatgatgattataactcatgatatggattttgctaaaaaagtagcagatagaatagtatcaatggatgctggaaaattacaagaaggtctaatgtttgaagaagactagctgtattaggattgaggttgaattaaacctcaatttttttaacaaattatttataagttaataaaagctttaatatattgtaaattgagaaggtttaaatttaacaatttaattgtaagaattagtgttgaaatatgtggcaaagtgtggtattctaagagtgtaagataattcaagatttaatcaatactgtacattcgcctctgtttcagagattgggtctaggtatcaggttataatctttggaaaaagggaggatttttataatggaagatagaactttagtatgtaaagattgtggaaaggaatttgttttcacagttggagaacaagaattctacaaagaaaaaggatttgataacgatccagttagatgtcctgattgtagaagagctagaaagcaacaaagaaacaacagaaacttcgacagatagtaagttgttgagtcataagagaaatcttatgactctttatttttgtatagagaattatacaatttaaattacacttgaagagatatgtgcgtaaaaaactgcatatatgaaaagagtgcgaagcacaatgaataacttaactgcattgactgaaattttattctactctggcaaattatatcattggatgatgcataaagaattattaaaagcataaaaacatatagatttttattgctgagaatagaaaaataaatttttagacgtagataattataggatgaatagaaaacactataattatctgcgtctttttttgagcatatattatgttgaaattgatgttttacaccataaaaatgtgcacaatttaagaaaaagaagaaaagccttataatacataaaaatatatgtcaaataaataaaatgcgaattatataaagatgaaacaaatatataattcgtaaaaacataaattaaatgaaattttaacataaaataggttgacaacatacgtgttgaatgataatcttatggtatcgatacgaaagttagtggagtgttataagaaaacattcgccattgcgaaggcgtagtgagtaggtaaatgaagaaataacaggttcaatatgagagtatattgacgtggtgtttttgaatgcacctaggctaaatctcataatattttttggaggaattaaaatgttaaatattagaagcgtattcgttgaaaagaaaaaaggatttaatgtagaagctcaaagtttactaaatgactttagagataacttgggagtaactggattagaagacgtgagacttgttaataaatatataatatcagatatacctgaagaatattataataaggctttacatacaattttttctgaagcaacagtagatgtagtttacgaatcagaattaccaatgaatgaaggagaaatagcttttggtgtagaatatttgccaggtcaatacgatcaaagagcagattcagcttcagaatgtctagctctattaacagcagaagacaaggtagaaataaaatcagctaaagtagtagtattaaaaggaaacctttcaaaagatgacattgaaaaaattaagaaatattatataaacccagtcgattctagggaagtagatataaatagcaaagatttatcgtcactttcaaacatacctaaagatgtacaaatcttagatggatttaccagcaagacattggatcaattaaaagagtttcatagtggacaaggtttagctatgagtattgatgatcttcttatgattcaagattatttcaaaggggagaaaagagatccaagtataactgaaattaaagttatagatacatactggtcagatcactgtagacatacaacattctcaactatcttagaagatgtccaaattgaagataataaatatacagctccaataaaagcaagttatgaaggatatataaaatctagagcatacgtttatggcgagaaagaaaaaaataaaactcttatggacatggctgtaattgctatgaaagaacttagaaaaagaggaaaacttgaagatttagatatttccgaagaaataaatgcttgttcaattaatgtaaaaattgaaactgataaaggcatggaagattacttagtaatgttcaagaatgaaacacataaccatccaacagaaattgaaccttttggtggagcagcaacatgtcttgggggagctataagagatccactatcaggaagaacctatgtatatcaagcaatgagagttacaggagcagcagatccaacagttccagttgaagatacattagaaggaaaacttcctcaaagaaagataacacttggagcagctcatggatatagttcatatggaaatcaaattggtcttgcaacaggtcaagttgaagaagtatatcatccaaactatgcagctaagagaatggaagttggagcagttattgcagcagcacctaaggaaaatgtggtaagagaagaacctgctttaggagatgtaattattttactaggtggaagaactggaagagatggtgttggaggagctacaggttcatctaaggaacacacagtagattcaataaatgaatgtggagcagaagtacaaaaaggtaatgcacctactgaaagaaagcttcaaagactatttagaaattctaaagtagcaaagatgattaagagatgtaatgactttggagcaggtggagtttcagttgcaattggagaactttgcagaggattagatatagatttggataaagttccaaagaaatatgaaggtttagatggaacagaacttgcggtttcagaatcacaagaaagaatggcagtagttgtaacaaaagaaaatgcagatgaattcataagactttctaatgaagaaaatttagaggctacgttggtagcacatgttactgatacagatagactgagattattctggagaggtaaaaacatagttgacttaaagagaactttcttagacacaaatggagcaactcaaaaaacaaatgttacagttaaagctccagttgattatccatatgtagtagcagatattgatgttaaagaagaatggataaataacttaagaaaattaaatgtatcatctcaacaaggtttatcagaaagatttgatgcaacaataggtcacggaacagtgcttatgccatttggtggtaagtatgcaaaaactccagcagaaggaatggcagctaaaattccagttcttcatggtgaaagtgcagatgcaacattaatgacatttggatttaatccggagcttggtacttggagtccataccacatggcatattatgcagtaattgaaagtatatcaaaacttgcagctatgggtggagactacagaaaagctagacttacattccaagagtattttgaaagattaggatcagaaagctctagatgggggaaaccatttgcagcattgcttggtgcatatgaagctcaaatagcatttgaaacagcagcaatcggtggtaaggactcaatgtcaggaagctttggagatttagatgtacctccaacattagtatcatttgctgtaggagtagaaaaagctagaaagataatatcaccagaatttaaagaagcaggatctagtttagttttacttcaaactgaaaaactagaagatggaactataaatttagataagcttaagaagaacttagacgtactatataaattaatccaagatgaaaaagtaatttcagcatctgctgttaagtatggtggagtttcagaaacagttactaaaatgacacttggaaatagaattggtgtagaaattgataacttaacaaaggatgagttatttggatttaactatggaactatagtactagaagttaagaatggtgttaatgtagaagaaggattcaaagattgtttatataaagaagttggtaagacaataagttcagcagttataatttccaaggaatatgatttgaatttagatatagaagctttagaaaaaacatacgaagaaaaattaaaatcggtatttaagattaaaacaaaagatgtagaaggaaaagtagaaacagttttatatgataaaaaatcaacactttcgcctaagcttaaagtagctaagccaaaggttgtaattccagtattcccaggaaacaactgtgaatatgactgtgctagagcatttgaaaaagaaggagcagaagttactcaagtagtatttataaatattactaaggaagctcttaatgattcaattgaaagacttgcaaaagaaataagtacagctcaaattcttatgattccaggagggttctcagcaggggatgaaccagatggttcgggtaaattcattgccaatgctcttagaaatgaaaagataagcaattctgtaatggaattacttaagaatagagatggattagcacttggtatttgtaacggcttccaagcgttaattaaattaggattagtaccatatggggaaatagttgatattaaagaagacatggcaacattaacttacaataatataaatagacatatgtcttcaattataagtacaaaggttgtttcaaataaatcaccttggtttagtgaagttaatgtaggagacatacattcagttgcaatctctcatggtgaaggaagatttgttgcaccagaaagcttaattaaagaattaatcgctaatggtcaagtggcaactcaatatgttgactttgatggcaatgtatcattaaatatgccgttcaatccaaatggatcaatgtacggaatagaaggtataataagtccagatggaagagttttaggtaagatggctcatagcgaaagaataggaacagatttatatagaaatatcccaggagactttgatcaaaagatcttcaaagcaggagtgaattactttaagtaaataagtgagagtccaaatctacgatttgggtcctcgaacttagttaacgccctaaggtgttaacctcctttaaaaatgatttggtgtgaatcagttaagcagacatctcaaatctatgatttgatgatggtcgcttactctgtgagtactcagcgagcatatgcgagtcgagtttcctttaaaaaagatttgttctttatgaaggttgattaagtaagtttctgggcgtcttattagctagaatgataaaatgcccagaatataagaatataagaatataagaatataagaatataagaatataagaatataagaatataaaaacttaaatgtgaaaatagttttatatttaaaaatttaaaaaggtatatatgtaaaaagttaaatttttaaatatgtataaagttaagtatataaatatttaaaaagataaatatgaagatatgtaaatatttatagtaataatgcgggttgcagtgatttaaaggaaactcgactcacttcgttcgctgagtaagttcgaatggcgaaatcaaagatttcgattctcacttatagtaataatgcgggctgcgggtatttataaggaaactcgactcatatgcgttcgctgagtaagttcgaagagcgaaatataaaatttcgattctcacttataatgcgggttgcagatacttaaaggaaatatataaattaaaaaacaggaggcttaagatgcaagtagcaatattttttggaagtaaatcagacacagaggttatgagaggagcagcaaatgctttaaaggaatttggaatagaatataaagcattcatactttcagctcatagagtaccagaaaaattagaagaaacattagaagaaattcaagctcaaggatgtcaagttattatagctggagcaggtcttgcagcacatttaccaggagttattgcatcaaagacaatacttcctgtaataggagttccagttaaagcagcaatagaaggtcttgatgcattatattctatagtacaaatgccaaagtcaattccagttgcaactgttggtataaataacagctacaatgcaggaatgttagcagttcaaatgttatcagttaataatgatgaattaaaaaataaattaaaagaattcagattaaatatgaagaaaaaattcattgaggaaaatgcggaaggggtagaactataatggaaaaattagaaatgttatatgaaggaaaagcaaagaaaatttacgcaacagataaggctgatgaagtaattgtatattacaaagacgatgctacagcattcaatggagaaaagaaaggccaaatcgaagataaaggtataatgaataatgctataacttcagtattatttgaaatattagaaaaagcaggagttaaaactcactttatagagaaactaaatgatagagaacaattatgcaaaaaggttgaaatagtaccacttgaagtaatagttagaaatgttgcagcaggtagcatggctaagagattaggtcttgaagaaggatttaaacttaagactactgtatttgaattatcatataaagatgattcactaggagacccattaataaatgattatcatgcagttggaattggtgcaactacttttgaagaattaaaagtaatctatgatatgacagcaaaaattaatgacactcttaaagctgtatttaaagaacaaaacataaacttaatcgactttaaagttgaatttggtagatgtgctgatggaacaatagttttagctgacgaaatctcaccagatacttgcagattctgggatgcaacaacaggagaaaaattagataaagatagatttagaagagacttaggtaatgttaaagatgcttatgttgaaatattaaagagaatttctaagtagtatatatttagaatcagatttattataaaatttatattagaatgcaattagtaatgcacaatgagggaactaagttcacagaggaaggttgagaattaataaattaagtcttgagtgttattttaaattcttatctatctgatgaattttgatgaattatgtgatttagaagtccaaaaaaatttcatccttaattgtgcattagttctcatgtattttaagttttctaaaaatagattagtgaaaggattgtatagatgagtaatccgaattttgaattaataatggatccaagtaatgataaatttaaggatgagtgtggggtatttggagtatatactaataagccaatagatgtagcatcaatgacttactatggactttatgctcttcaacatagagggcaggaaagtgctggaattgcagttgcagatggtgaaaaaatcgacatacataaaggattaggtttaatcactgaagcatttaagcaggaagatttacaaaagctaaaaggtcatatagctataggccacgtaagatattcaactgctggtgggaaaggtattgaaaatgctcagccaatacttgtttcatcaaagatgggaccaatagctatggctcataacggaactttagtaaatgcagatgtaataaaagaattacttgaagatggaggacaaatcttccatactacaacagattctgaagtaattgcatgtcttatagcaagaagtgcaaaaaaaggttttgcaaaagcagtagttgatgctatgtcagctgttagaggttcatttgcattaactattatgtcaaaggatagattaattggggctagagatccacatggaattagaccgctttcattggggaaaattgaagaaggttacattctaacttcagaaagctgcgctttagatgcaataggtgctgaatttgtaagggatatagaaccaggagaaatagttataatagacagtgaaggaatacaatcatacagatattctgaaaatactaaatgtcagacatgtgcgtttgaatatatatattttgctagaccagattctagaattgatgggcttgaagttcacacaacaagagttaaagcaggagaacagttatataaagagcatccattagatgcagatgttgttatagcagttccagactctggaataccagcagctatcggttatgcaaaggcttctggaataccttatgatactggatttattaaaaatagatatgttggaagaacttttatatcgccatctcaagaaataagagaaagagcagttgcagtaaagttaaatccactaaaatcaaacttagaaggaaaaagagttatacttattgatgactcagtagtaagaggcactacatcaaaacatttagttgagtcacttagacgtgtaggtgtaaaagaagttagtttcttactagcatcaccaagtgttaagtatccatgttattttggaatagatacaccttatagaagtgagcttgttgctgctaatcatactatagaagagattagagatatgattggagcagattatttaggatatctaagtgaagaaggcgtttataagagctgtggtgatagagaagaattttgtatgggatgctttaatggagtttacccagttgcaacaccagtagagaaagagatatagacatctaaggcacattcatctattgttttttgaatatgtcaatagcattttgaaaggtggagttaataaatgattacttacaaagaagcgggagttaacatagaagaaggatataaatcagttaagcttataaaagaatatgcagcaagaactatgagtaagtatgttttaaatggtcttggaagttttgctggaatggttgaattaccatcaggttatgaaaaaccagttttagtttctggaactgacggagtaggaactaagcttgaaatcgcatttaagaacaagaagtacgatacagttggtattgactgtgtagctatgtgcgtaaatgatattttatgtcatggggcaaaaccattatttttcttagattatatagcttgtgggaagcttgaagctgaagttgcagcagatttagttaaaggtatatcagatggatgtgttgactctgattgtgctttaattggtggagaaacagctgaaatgcctggattctattcagatggagaatatgatatggctggatttgcagttggcatagctgacaaagataagattattaatggaagcaatattaaagatggagataaattaattggtatagcttcttctggaatacattctaatggatattcattaatcagaaaaatattcccagatttaaatgaaaaatttaatggtgaagaagtatggaagacattaattacaccaactaagatttatgtaaaaccagtacttaaattgttagaaagctatgagattaaaggtatggctcatgttacaggtggtggattcatagaaaatgttccaagaatgtttaatggtggagacttcacagctgtaattaacaaagattcatatccacttccagctatatttgaaagaatcattgaaaaaggtgtagataaggaacatatgtataacacttttaacatgggaataggatttgttcttgctgttaaagatgaagatgtggaacctattataaaggctttagtagaaatgggagaaaaagcttatgaaataggatacgtaacatctgggggtgaaggtatttgtttaaaatagcggtcttggtttctgggggcggaacagacctacaatcggtaatagatgcggtggaaagtaactatatgaatgttaagatagagatggttataggaagccgtgataatatttatgctttagagagggctaaaaagcataatatagatacttttgttgttaataggcgtgagtatggtgaagaatcctctaacaagatcttagaattaacaaagggaaaggttgatttaatagttcttgcaggatttttggcaattttagatggggaaatattaaaagaatttgataatagaattataaatattcatccatctttaattccatctttttgtggacctggaatgtacggattaaaggttcatgaagccgtaattaaaagtggtgtaagattttcaggatgtacagttcactttgtaaattccgaagttgatggtggtgctatacttcttcaagaagttgtgccagtttattttgaagatgatgcggaaactcttcaaaagaggattttagaaaaagaacacgaaatattacctaaagcaattaagttaattagcgaaaataaaatcagagtaattgatggtagagtcaagatagaagaataaaggaggccttttcgtgaaaaagagagctttaataagtgtatttgataaagagggagttttagattttgctaagtttttagtatctaaagatgttgaaattgtatcaacaggtggaacttataaatatttaaaggaaaatggattaaatgtaattgaaatcaatgaagttactgattttcctgaaatgttggatggaagagttaaaacacttcatccattagttcatgctggaatattagctataagagacaatgaagaacatatgaatacattaaaaggaagaaatattcatactatagattatgtagttgtaaatctatatccattctttgagaaagttaaagaagatttagaatttgaagaaaaggttgaattcatagatattggcggacctacaatgcttagagcagcagctaagaattttcaggatgttgtagtgatttctgataaaaatgactataaagttgttatggaagagattgaaacaaatggtgaaacttcttataaaactaagaagaaattggctggtaaagtatttaatcttatgagcgcttatgatggggctatttcaaacttcttattagctgatgatgaagaagaatatccagaatatctttcagtttcatataagaagatgcaaagccttagatatggtgaaaattcacatcaaactgcagctgtttacgcatcaacaatgcttgatggagctatgaacacttttgaaacattaaatggtaaagaattatcttataataactttaaagatgtggatatggcttggaaatgcgctaatgaatttgatgaaccggcatgttgtgcattaaaacataatacaccttgtggtgttgcaattggaaaagattcttatgaagcgtatatgaaggcatatgaagtagatccaacttcaatatttgggggaatcattggatttaatagaaaagtagataagaaaactgctgaagaaatggttaaaattttcttagaagttatagctgcaccagaatatgatgaagatgctttagaaattttaaaaactaaaaagaacttaagagttcttaaattccataacactccaaaggcagataaatatatggttacagttgatggggcaatgcttgttcaagaggaagataataaattagtagaagaaattaaagttgtaactgaaaagaaaccaactgatgaggaaatgaaagatttattattcggaatgaaagtagttaaatacgttaaatctaatgctatagttgttgctcataatggaatagcacttggaattggcggaggtcaagttaacagaatttggccaacagaagacgctttaaagagaggaaaaggagctacaatccttgcatcagatgcttatttcccatttagagatgtagttgatgaagctgctaaaaacggtattaaagctataattcaaccaggtggttcaatgaatgatcaaaaatcaatagatgcttgtaatgaacatggaatagcaatggtgtttacaggatatagacattttaaacactaaaattggaggtatgtaaatgaaacttcttttaattggttcaggtggtagagaacatgctttagcttggaaacttgcaaaaagtgaaaaggttgaaaaaatatttgttgctccaggtaatggtggaactgcaattgaaaataaatgcgaaaatgtaaacataactgatattgatgaattaattaaatttgctaaggaagaaattattgatcttacaatagttgggccagaagatcctttaacaaagggaattgttaataagtttaaaacagaaggattaaagatatttggaccagcagaaaatggagcaatgcttgaaggaagcaaaagtttttctaaagaatttatgaaaaagtatggcgttaagacagcagaatacgaaacatttacagatgtcaatgaagcgcttaaatatttagatgtatgtccttatccaacagtagttaaagcagatggtcttgccgcggggaaaggcgttgctatatgtgaaactaaagaagaagcaatagaagcagtaaaatcttatatggtagatgatatcttcaatggagcgggtcaaaaaatagtaattgaagaattcctagaaggtgttgaggcatcaattctatctattactgatggaaagacaataattccatttatatcaggtaaagaccataagcagatatttgatggaggtaaaggaccaaacacaggtggaatgggagtattagcaccaaatccttatgttacagaagatgtgatgaaggatttcgaagaaaatattatggctaagactttaatcggtattagagaagaaagctttgattataaaggaataatcttctttggtatcatgattactgcaaaaggaacttatcttttggaatataatgtaagaatgggagatcctgaaacacaatcagttctttatctaatggaaagtgatttagtagaagtcattgaagcagcattaagagaagaactagataaaaccacaattaagtggaatgatggtatctgcataaatgtcgttttagcatctaaaggatatccaggagattttgttaaaggatatgagataacaattgatgaaaaagttaaagataaagtattcttagcaggagctaaagcagaagatggagttttaaagactaacggtggaagagtattatcagttatcggccttggaaaaactctagaagaagctagaaaagacgcttacgaaaatattaaatatgtgacttttgaaggggcatattgtagaagtgatataggaacatacaaataagtatacattagggaaataagctattaggtattgttattatttagtcaataacacctgatagcttattatattgaaaattaatctttcaccataattctgaaaatattggaagaattttagtcgtaattgtgaattgcgccataggtatgttaaaaattgagaatattacatttattaaccacttgccaattgatttgtaattaattccatgttaaaataatcatgaaattttaatattatgtatataaggaaaccatgattcgaatatttatttgggcactttatattcgatgagttaatagtgcaaccgacctttttattaaggtcggtctttttttgctgactcaaatatagataagccaattataaactatatctagactatgaaatatgtactaactagaaataagaattatgcttttgtgaaatgtttcattaggaatttgatggttctgattcttaaattggaagttgttccaaatatgctagttcaaagcttgtctttgaagctagcatcttgggtgcaacttgtaatcttagaatcatccatcataattctttagaaactggaacaacagcataatccttatttcggtgagctatatgcataggtttagatttcacttggcatatctataaataattatatagataataaattaaaattgaggtgcaatctttatgttattttttaataggttaaagaaatatgatgaacatgggtttgattcaaaaggaattcataaaaacggtacaaaatttaatgaagagggttttgataaaaaaggggttcataaaaatggcacatattttaatacagaaggctacaatatagacgggtacgataaatatggatatgataaagaaggatataatagtggaggatatgacagacaaggatataacaagatgggatataatataaaaggatatgataggcaaggggaatttttagaaacaagatataaatggaaattaaaatagaaaaatttatttgaaagcactaatgcaggggtgtatctactcgcgcatgttctaaatttcattaggacaagcaagggaagaacagctctgcattaactgtttttaacagcttatttttaggtactcttagtttgaatatagatttcccaaacaagaacttgacatatacagcaagctaaatcaagtaaattgaagaactaatccaatgtatattattcgtttcggtgagctatacgcataggttcaggtcttagtctatttatttatactacaagaattctaggcataattgtgaattgtgaaatgtgcattgtgaattgtaacaaacagatgctaataagtttttattaaaaattcctacgaatatattgacatgtaattctacaaggtgtagtataaaaatataaatactacatcttgtagaattacatagaggagatgattaaatatgaagttagggaagatatcggacgctgaaatggagataatgaaaataatatggaaaaagaatgatcaaattactacagctgagattctagatgagcttccaaaagaaaattcatggaaggtaacaacaataatgacgttgatatcaagattaactgaaaaggggattttgagtgtaactaaagtaggaaagttaaataattattttcctaaaattacagaagaagaatataaagctattcaaaccgataatttcttagaagatatgcataagggatcagttaaaaactttatggcaacattgtttaataataaaaaaataagtaataaagatattgcagagttgaaagaatggctcaaagaggtatagaaatatggagattctaaattatattatgcaaatgtcattagcaggcagcgttatgtttttaatactttgtttatttagaccatttactaagaaaacttttagtgctacttggaattattatatgctatttataacgcttttaatttttattatacctattgggagctttgttaaattgcctcaaatagtggagcataagaattacttattaaggcaggatgatatgaatacggtagtgcagcaaaattatgaaaagatgcttaagagcaatgataaaagtgatgagataagagtcttgcaaggggatggcactcttaagcctgtaagccaaagtcaagtggatttaaagcagacaagcatgatgcaaaaaattatgaatagaaatatgctgctttatgcatggatattaggtgtactcatactagtaattaaggaaacttacgtatatatttctttttataaaaaacttaaaagtgtaagtgatattattgatgataaatgcataattgatgtttttgaaaactgtaagaaaaaattaaatatatataggaagataattttaaaagaatgcggtggcattaaaagtccaatgattacaggaatattaacacctactatcacaattcctaagatggaccattgcttggacaagcttgaaataatactggatcatgaattaattcattttaaacgtaaagatttatgggtgaaggtagttgcacttttagcaaatgtaatcaattggtttaatcccattgtttatattattagaaataggataaatataatttgtgagctgtctttagatgaacaacttataaagaatatggataaatcaaaaagaaaatattatggagaaattatattagagttaatagaatattctcagaataaatccctaagtttaggggcatcagtttgtaaaagtagaaaggagattgagacacgattgaaaaatatagtgttttttaaaaagtcaaagaaaataattgtttgtatttcacttatagtaactatgatttttacatctacaagtttgcttgcttcaaagactgtatttgctagtaatagtgatacagcaaaaagtgctaaagggtcagaatttgcagtatttgtatcagatgatggtttatatatgtctgaattaaaagataataaccaaatacttcttgataaaaatgaaaaaattaaattaccgaaaatatctaaagatggtctatatgttgcctatactaaagaagatgatttatatatctgtaatatagatactcgtgaggtaattgaagtaaataaaaatgtagagtcgtatgattggaataattctggaaacttaatttgctctgctaaaaatgcaggtatgtctatgtataataccaatactaaaaagttagtggatattataagcaatgagtatgattattttaatataaattgcgatagtaaaaataaggtatatgctaataaacagctagaaagtactacagacaaagggaaaactattaaatcaataggtataattagctatgacttagatactaaagaagaaaaggttattttggaaggaaaagaaggaaataataaagagattggagagcagtatgcagtatctgaattatttgaatctattggatcaaggcctaacgttgagaggatatcaagtgatgatagatacatgtatgtatggaacaaacctaattcaggatcaatgtcagctgatatgacagaatttgcagtatatgatcttttaagcaataaatttatagaaaataataatatgattgcattagcatataaagataatatttctcaaaatccagtggatagcagcatagttgctgttaataatggcgaatatagagacatgtatagcaacaagacattaggaattttcgatatcaaagctaataaatttacaactctaattccagaaaaccaagtgtcaatgacaccatgttattctgatgatggtaaaaatattctgtattcttcagctcaggtattagaagatattaataattcacaaaatttaaaaacatgggaaagtgaaccacactatatttatcaagtaaacactgaaacaaaagaaataactcaaattacaaataataaatcatttgatttcatgccaaaatatttatcagaaaatcaaatattatttgtaagaaaagatggcaattcatttagtttatggaagacaaaggatggagtagaaactaagcttgctgattctttgaattttagatcaacttcgtatacaaatacttggtactatggtcattataaaactgaaaatgttatagacgtatataaaaataaaaagtaaatgcttcatatatatgttgcccaaataatacttcatcataattctaaaaatattacaggaattttggccgtaattgtgcattgtgaattgtgaattacaatatatataagttcaatatgataaaatactcaattgtatataaattgagtattttatcattttagtgattaatataagctgttcactaggtttatatactgaatagaaaaaataagcttttagttgtaattttgaaatagtcgaatataaatctattctgttatcttcatatatatgtaagcctgactatttctactagatagttattatgaaagtgagatttacatctcctaaagtttttaatttgaattcccaactctttattttgaaaaaactaaagaaatgtatatgtatgaaacaccattctcgaatatatatttattaacaatggattgatatttcttatttttgtgttaaatagctgtttttaaaataagtgaatgtcaaaaaaagtagaaagctaaaaacgatatttaaaaaaatataataatacttggaattttttcgtattttattttacgttgggttattgtagatttttttgtattttttaagaaagaaaaccttgtcatgatatatgtgaagcatttataattagattacttttaaaaataaaaaaatacataaataggggagataataatctaatgaagaataaaaaactaaaacgacttatagcaactgctatgataacgacgacattatcagcaactgtgcctactgctataaatccaactatagcttttgcgagtgagacagtatataacacagaacaggaggctgaaaatgatggatttgcagttgagttaattaatgataatactgaatatgctataactggatacgcaggtaataatacggatgttacaataccatctaaaattaatgggaaaaacgtaacgtctataggtgagagcgcatttgaagacaaaagcaatgtaacatcaataataattccagaaggagtaacaagtataggttattcagcgtttgccttttccagcaatttaacatcaataacaattcccagtactgtaacggtcatagaagattctgcatttatttcttgtactagcttaacatcgatagctatcccagaaggagtgacacgtataggtggcatggtgtttactgactgcactagcttaacatcggtaacaatccctaatagtgtaacaagtataggctttgctgcatttgagcattgcattaatttaaagtcaataataattcctaatagtgtaacagatataggtgagaatgcgtttgctgtttgtacagctctaacatcaataataattccagatagtgtaacaagtataggtagcgttgcatttactaactgtgctaacctaaaatcaataacaattccagatagtgtaataagcataggggattatgcatttgatgatataaatgattatgcaacatttcatattcctaaccaaagattagcagacttacttctaagatataagaaagataatatgcaaattattataggagatcaaagccaaacatacacagtaacatatgatggaaatggaagtacaggaaatgtaccaacagattcagaaagctatgcaggtgatgctacagcaacagtattagaaaatacaagcttagtaaaggatggctatacatttgcaggctggaacacagcagcagatggaagtggaacagattacgcagctggaagcagcctagctataagtggtagtaatataacattatatgcgaagtggacaaaaaatcaagatatagatcctggatttacatatcgactaattaacaatgacacagaatatgagataactggatacacaggtactaatacagatattacaataccatctaaaatcaatgggaaaaacgtaacgtctataggtaatagagtatttgacgggagaaatgatttaacatcaataacaatcccggaaggagtaacaaacataggtgatttcgcatttaattattgtagtggcttaacatcaataacaatcccagaaggagtaacaagaataggtaatttcgcatttaattattgtagtggcttaacatcaataacaatccccaatagcgtagcaagcataggcgattatgcattttttgtttgtgttaatttaacatcaataacaattcctaatagtgtgacaagtataggtgattctgcgtttatgtactgcagtagcttaaaatcaataacaataccagatagtgttacaagtatagaggattttgcatttgactatattaacgattatgcaatattccatgtagatagcgaaagattagcggatttacttcaaaggtataagagcggtaatattcgaattattgtaggaaatcaaacatatacagtaacatatgatggaaacggaagtacaggaggaacttcaccaacagattcagaaagctatgcaggttatgctacagcaacagtattagaaaatacagggaacttggtaaaggatggctatacatttgcaggatggaacacagaagcagatggaagtggaacagattatgcagctggaagtagcttaactataagtgatagtaatataacattatatgccaagtggatactaaatgaaaatatagatactggatttacatatcgactaattaacaatgatacagaatatgagataactggatacacaggtactaatacagatattacaataccatctaaaatcaatgggaaaaacgtaacgtctataggtaatcgcgcattttattcttgtagaaatttaacatcgataataattccagatggtgtaactaacattggggagtatgcgtttttttattgtgatagttcaacatcaataacaatccccaatagtgtaacaagtataggcaattatgcatttgcttattgtagtagcttaacatcaataacaattccagaaggagtaacaagtatacctgattctgcatttgaaagttgtagtagtttagcatctataataatcccagatagtgtgaaaagtataggtgctgctgcgtttgcttattgtagcaatttaacatcagtaacaatcccagaaggagtaacgagtataggtgatcagttatttcatggttgtagtagattaacatcaataacaatccccaatagtgtaacaagtataggtaattatgcattttataattgtagtgctttaacatcagtaacaatcccagaaggagtgacaagtataggtgattttgcatttgcttattgtagtagcttaacatcaataacaatcccgaatagtatagaaagtatagggaatgatgtatttctttattgcggtagcttaatgtccatgaaaattcccaatagtgtagcaagtataggtaatgatgcatttgcttattgtagtagcttaacatcaataacaatcccagatagtgtaacaagtataggtggtagcgcattttatgctattaataataatgcaatattctatgtagatagccaaggattagcggattcgcttcagtcatataaggtaggtaatattaaaattattgtagcaaatcaaacatatacagtaacatatgatggaaatggaagtgaaggaggaaccgtaccaacagattcagggagttatgcaggtgatgctacagcaacagtattagaaaatacaagcttagtaaaggatggttatacatttgcaggctggaacacagcagcagatggaagtggaacagattacgcagctggaagcagcctagctataagtggtagtaatataacattatatgcgaagtggacaaaaaatcaagggatagaccctggatttacatatcaactaattaataatgatacggaatatgaaataactggatatataggtaataatactgacatcacaataccatcccaaatcaatggaaaaaatgtgacatctataggtgaatatgcatttggatggagtaacgtaacatcagtaacaattccaaatagcgtaacaagtataggttataaggcatttttcatatgtagtagcttaagaacaataacaattccgaatagtgtaagaagtataggtgatgaggcgttttatagttgtagtgctttaacatcagcaacaatcttagacaatgtaacaagcataggtgagcaggcatttgctaattgtcaagccttgacatcaataacaattccagaaagtgtagcaagtataggtgatggtgcattttataattgcagtagcttaacgtcaataaaaataccggatggagtaacaagtataggtgttcaaacatttttggattgtagtaacttaacatcagtaataataccagatggtgtaataagtataggtggtgatgcatttaatggttgtagtaacttagcatcaataacaataccagatagtgtaacaagtataggtaattatacatttgatagtattaatgatcatgcaatattctatgtggatagccaaagattagcaaatttgcttcagatatataagacaggtaatattcaaattattgtaggaaatcaaaaccaaacatatacagtagtatataacggaaatggaaatgaaggtggaacagaaccaacagattcaggaaactatgaagcaaatactgaagcaacagtattgaataacgcaggtaacttggtaaaacctggctatacatttgtgggatggaacacagaagcagatggaagcggaatagattatgcagctggaagcagtttacctataggtgatagtaatgtaacattatatgcgaagtggacaaataatcaagaaatataccctggatttacatatgaattaattaataataatactgaatatgaaataactggatacacaggtactaatactgatgttacaataccatctcaaattaatgggaaaaatgtaacgtctataggtaatagagcatttgccgggagaagtgatttaacatcaataacaatcccagaaggagtaacaagtataggtgatttagcatttaattattgtagtggcttaagatcaataacaatccccaatagcgtagcaagcataggcgattatgcatttttttattgcggtagcttaacgtcaataacaattccagatgctgtaataaatataggcaattatgcattttatgattgtgttagtttaagatcaataacaatccctaatagtgtgacaagtataggtaattatgcgtttatgtactgtagtaacttaacatcaataacaattccagatagtataacaagtataggtaattatgcattttactatattaacgattattcaaaattatatgtaagtagccaaagattagctaatttacttcagccatataaggtaggaaatattcagattattgtaggaaatcaaaatcagacatacacagtaacatatgatggaaatgaaagctcggaaggattagtaccaacagattcaggaaactatgaagcaaatgctgaagcaacagtattgggaaatacaggaagcttagtaaggtatggctatacatttgcaggatggaatacagaggcagatggaagcggaacagattacccagctggaagcagtttagctataagcggaaatgtaacattatatgcaaagtggataaaaaatcaagatatagatcctggatttacatatcaactaattaataacgataacgaatatgagataactggatatacaggcactaatacagatattacaataccatctcaaattaatgggaaaaatgtaacagcgataggtaatagggcatttcaagagaaaagcaatttaagatcgatagtgatcccagaaggagtaacaaacataggttatgctgcatttgctaattgtagtggattaacatcagtaacaatcccaaatagcgtaacaagcatagataatgccgcattctatacttgtagtaacttaagatcgatagtaatcccagaaggagtaacaagtataggtgagtatacatttggtgagtgtagtggattaacatcagtaacaatcccaaatagtgtaataagtataggtgattctgcatttagtagatgcagtaacttaacatcaataacaatcccagagaatgcaacaagtgtaggtaattatgcatttgttggttgcacagcattaacatcaataacaatcccaaatagtgtaacaagtataggttatgttgcatttaatggctgtagtaatttaacatcaataataataccagatagtgtaataagtataggtgagtattcatttaatggtattaacgattatgcaatattttatgtagatagtcaaagattagcaaatgtacttcaggtatataagattggtaatattagaattatcgtaggaaatcaaaatcaaacatatacagtaacatatgctggaaatggaaatacagaaggaactgtgccaacagattcaggaaattatgaaactaatgttgcagcaacagtattagataatacaggaaacttaaaaagagctggttatacatttgcaggatggaatacagaagcagatggaagcggaatagattacgcagctggaagcagtttaactatagacagtggaaatgtaacactatatgcgaagtggacaagaaaccaaacatatacagtaacatatgccggaaatggaaatacagaaggaactgctccaacagatttagaaaactacgaaggcaatgatatagtaacagtactaggaaatacagacttggtaaaacctggctacacatttgtaggatggaatacagaagcagatggaagcggaatagattacgcagctggaagcagtttaactataggcagtagaaatgtaacattatatgcgaaatggacaagaaaccaaacatatacagtaacatatgttggaaatggaaatacagaaggaactgctccaacagatttagaaaactacgaaggcaatgatatagtaacagtactaggtaatacagacttagcaaaacctggctatacatttgcaggatggaatacagcagaagatggaagcggaatagattacgcagctggaagcagtttaactataggcagtagaaatgtaacattatatgcgaaatggacaagaaaccaaacatatacagtaacatatgctggaaatggaaatacagaaggaactgtgccaacagattcaggaaactatgaagtaaatgctgaagcaacagtattaggaaatacagacttagtaaaacctggctacacatttgtaggatggaatacagcagcagatggaaacggaacagattacgcagctggaagcagtttaactataggcagtggaaatgtaacactatatgcgaaatggacaagaaaccaaacatatacagtaacatatagcggaaatggaaatacagaaggaactgtgccaacagattcaggaaattatgaagcaaatactgaagcaacagtattaggaaatacagacttagtaaaacctggctacacatttgtaggatggaatacagcagcagatggaaacggaacagattacgcagctggaagcagtttaactatagacagtggaaatgtaacactatatgcgaaatggacaagaaaccaaacatatacagtaacatatagcggaaatggaaatacagaaggaactgtgccaacagattcaggaaattatgaagcaaatactgaagcaacagtactaggaaatacagacttagtaaaacatggctatacatttgtaggatggaatacagcagaggatggaagcggaacagattatccagctggaagcagtctaactataggaagcggaaatgtaacactatatgcgaagtggacaagaaatgaagaaataagcgttgttaatgtacattcaatagataatataactgttgaaaatggaacatctataagtgatatagatttaccggaaacagcaactatagaattgagtgatggtacaacaacaagtgcagcagtaacatgggacaatggaaatccagaatatgatggagatacagaaggaacatatgtatttacaggaacattgacattaccagaaggagtaactaatccatctgatttaaaggcgattatgtccgttaatgttaaagcagctgaaaatgaaacaccgccatcagcagtaacagtagaaagtatagaatcattggataacataactgtagataatggaacagaaataggtgatattgaattaccagatacaattgatgtaaatttaagtaattcaacaacaacaagtgcggcagtaacatgggacaatggaaatccagaatatgatggagatacagaaggaacatatgtatttacaggaacattgacattaccagaaggagtaactaatccatctgatttaaaggcgattatgtccgttaatgttaaagcagctgaaaatgaaacaccgccatcagcagtaacagtagaaagtatagaatcattggataacataactgtagataatggaacagaaataggtgatattgaattaccagatacaattgatataaatttaagtgattcaacaacaactagtgcagcagtaacatgggataatggaactccaaaatatgatggaaataaagcaggcacatatttatttaaaggaatattgagattactagatggaataactaatccaagtaatttaaaagcaagtgtggttgttaatgttagaccagctaaaaatgaaacaacaccagcggcagtaacagtggaaagagtagaatcattagataatataactgtaaacaatgggacagcaagaaaggacataaaattaccagatacagttagggtaactttaagtgactcaataacaacaagtgcaaatataagatgggaagatgtaaatcctatatataatggatatagagcaggaacatatgtgtttacagggaaattaatattaccagaaggggtaactaatccatacgattactcaacaaaggttaatgttatagtaaaagcagcaagcagcagttcaagctcatcatcaagccatcaccatagctcaagcacagatacaacttctacaagtgtaactgataaaacaaatgcaataactaataacacaactaataccggaaatagtaatactactaatgctgatgctaacattaaaggatgggcacaagatacaagcggtaattggtatttagaaaaggataatggagataaggcaaaaggttggaaattggttgataataaatggtacttttttgataataatactggatctatgaaaacaggctggtataaatcagaaattggagattggagttatgatggacaagatactcaaggacaatggttccatttaggttctgatggtaagttaacaacaggatggcttaaagatacagataataattggtattatctatgtgacggaagtcgatatggcgcattaggagttatgaagactggatggcagcatatagatggaagctggtattactttaatagcaatggaactatggcaagcaatactgtagttgatgggtatacattaggaagcaatggagctttaatttaataaggctatatgtgatagttagctttaaaaataataaatgcacaaaataaacatagttatgcgactacatagttgtataactatgtttttattatggactttagtctgctgagctcgcgcgcgtgcgaaatataaaaccacctgctatgcgggtggctaacatgtgttatacaaagaaactcacttttccgagttataatagaagtgttcaagctactattataggaaggaaaggtgagttccatggataaaagtctagcacacacaagatggatgtgcaagtatcacattatatttacgccaaagtttagaagaaagataatttacaataagtacaaagaaagtattaaggatatattgaaagatttgtgtaaatacaaaggtgtggaaattatagaggggcacttaatgcctgaccatatacatatgttggtatcaattccgcctaaaatgagcgtagcgagttttatgggatatctaaaaggcaaaagtgcactaatgatatttgagagacatgcaaatttgaaatataagtttgggaatagacatttttggtcagaaggatattatgtgagtacagtaggactaaatgaagcgacaattaagaaatatatccaagatcaagaaaaagaagatcaaatgagagataaattaagtattaaagaatacgaaaacccttttcaagggtagcgagtaatacgttggcctctttagaggcagcaaaagtaacaaaggcaaagcagcttgaacgaagagaaagctagcgtctttaggcgccagccagtaaaaaagccttataggcgcagagcaagccacccgttttacgggtggttatgacttgcaaacaaccgagactaaacttgctaattctttgagtattttattattttagtgatataattctgaagaggtgataatatacatttgacatttgttttatttaaagattttggaagtaagtatgcaagatttgcagtagatagtaataataaatatattattgatgaagaattatggtatgattttcagcattatgtcttaaaatatgcgaggagcaatgcaaactttgaaaaagtattaaaaatagatgagcaatatagttattttggaggaattacagatgagtccttactttaagatataaaaaaataatcttatactgcctttcaatttaaattagtgctaaaagtgaaaattaagtttaagaatatagataacccaactataagttagattttatactatgaaatatatcccaactagaaataagaattatgcttttgtgaaatgtttcattaggaatttaatggctctgattcttagattaaaagttgttccaagtattctagttcaaaaagtgagaatcgaaattttacatttcgttcttcgaactttctttgtgagcgcttgcctttggggctagcatcttgggtgcaacttttaatcttagaatcatccatcataatttccttagaaactggaacaacagcataatccttatttcggcgagctatatgcataagttcaggtcttagctggggtatctatagagttaataaatcaaatgaatggatgaagagtaacatggaaaacaagaattatttatacaataattatataaacatggcgagaaatttaagatcggaaaataatttattaaaagccctttcattttatcaaaaggcatatgtcttaaatataggaaaagaagatatagaattactaatggatatggccctaatttatgatgaaattgggttatctggtgatgcagagaaaaagtatcgagaagtaattgaattagatgaggatgatgctagagcatattatggcttggcaataatatatgatgaattagaaaaggctaaaaaatattacaagaaggctatagaaaaaaatcccaattatgataaagcatatttctttttagccaatatatatgatgaatcaggtgaaaaggataaggccataagtaactataaaaaggttattgagataaatcctaattatatgtgggcatatgcaaatgtagcttgtattttagaagaaaacaatgaaaatattgaggcgctaaattatataaataaggctttagaaattgaggatggacattacaaaatattatttaataaagcagtaattttaaataagttaaataagatagaagagagtaaagaatactattacaagtctattgaagcaaatcccaattatccgtatagttttttaaatttatctgtagcatatagagaagaaggtaattttgaaaaagctattgaagtaataagcgagggaatagaagaaaatgatgatgaaggttttttatattataatagagcttgttactatgtaaatataaatgaaaatttaaaagcattaagagatgtagaaaaaagtatagaattaaatgaattctttttggagtatatgaagaaagacaaagaattagatccaataagagcacttgaagaatataaagattcgtatagagactttctagatgagaattgaatttatgtgaataccatccgaaattggatacatatttgttccataagactatgaaaatttcgatagaaggttctaaagtgcaaattgcactcgattcagcatacttctttctactttctagtattgtacctatacttgaaatatactatacaccagaaatgaagggcatgcttttgtggaagtattgcattaagtatttatcggtaacttctaatgttagaaatccatagtcttattctctagcatactggaacaacagaatacccattctttcgactggctactgctgaaagaatgggtactctgttatttctatttaatttgcatacttaatagtagataagtctgatgcatgttcatattctattgtttcattattatataggaattttacaccatcaatccattcacctttagatttgttgttagattgaaggaagttttcaatcaaagtattagctgtaactgaaccaccagttgatccttggaattttggaacccattttttattatttgagtcagtcaagtttatagtggcaacttttttaccgttaacagtatctatagatttaacttcaattggcaaactatcaaattttttctctgatacagcttttgctaattcttttagcttgtcctgtagagcggaattttcatttacttcaatggtacctgattcatttggttctaaagagttatcatctatactatatatagaaagttttaccttatttactttttttgcatcgttagtagtttcattaacttttttactatcagcattagaagagccattgtcgtctttgttttgctctacagtagtagtgttattatcactaggcttaggggaatcactaggctttgtgctacaagaaaccattacagtacttaacattaaaactgtagctataattaactttctagtcatgatatgtacacctcctatgtttaaaaattaatattatagataatattaactaatttaattaattatatcatatgaaattgctaattaaaagcatacgaggggctggaaaaaattgaaaaaaatttgacaatgtattttgagtatagtatattttgattatcaaactatttgattttaaaactttttaattaaaggcgaggcatactcagaaaatataaagtaaatatgtttgtttatatattttgtctaaagtaatttgaaacttttcatgattcattttggattcaatatgaattttgcttagccaattttaggacaaaatatcattatgtcgtttgcttgttattttatttcatatgtctaattggtcaatagattgtgtatttggtatgatatttaagattttcattaccaaatttttcattttataaacactgaatataatttttgttagaagatatttttggatgccaaaatggagagtgcagataaatggataaatcaacaaaactgattaacgagcttttggtgcagttatttaatgatgtcttacaaattgaggagcaaagtttaaagaatggtgtactttcagatctttcaataacagaaattcatactatagaatccattggtatgtacagtgaaagaacaatgtcagaggtagcgcagaaattaaaaattacagtaagtactttaacaactgctatcaataaattaattaaaaaaggatatgtagaaagaaacaggatagaaacagacagaagagttgtccttattaaattaactagaaaaggaaagttagcattcagaatccatcagagatttcatggagaaatgataaataatgcaatagaaggattaacgttagaagaagaagaaattttaatttcttctttaaataaaataaataacttttttaaggaaaaatatgaattagtataatgaaggagaaaaatatgagtaatattaaaattgctggaattggagcatatcttccatctctagtagttactaatgatagaataagtgaattcgttgaaacaagtgatgagtggatagtgcaaagaacaggtatgagagaaagaagaatctcagaaggagaaaatacatctgatatctcaacaaaagcagctaaaattgcgcttgaaagagctggtattgatgcaaaagatttagaacttattattgttgctacaattagtcctgatatgtttataccatcagttgcatgtctagttcaaagtaatttagatgcaagcaaggcagcttgttttgatataagtgttgcatgttcaggatttgtatacggcttggagacagctaaagctttaatgatgtctatgaactataacaatgcattagtagttggagctgaagttctttcaaaagtaacagattggacagacagaagcacttgtattttatttggagatggtgctggtgccgctgtacttaagagggatgaggcaccaggaataattaaatcatatttaagagcggatgggaaaaagggggaagcacttactataggtgctactgattttgatactcctttttcaaaagaaaaaaaattagctaaaagaaccatcgatatgaatggtagagaaatacttagatttgcagtatctgcaatagatgaagccgttactgaagtcatgaaagatactaatgtctcatttgatgatattaaatatatagtacctcaccaagcaaattatagaattataaaattagcagcagaaaaattaaaattaagcgaagataaattttatttaaatctagaaaaggtaggaaatacatcagctgcaacagtgcctatagctttaaatgaaatgtatgaaaaaggcttactaaataaaggggataaaattattcttgtcgcatttggtggtgggttaacttatgcagcaacattacttgagtggtaattaaaaataatagttaaataagcttttattatttaactttaaaatatatttatctataaaaatggaatggttatgggaataaatattatgtcatttgagattagaaataatacaatatgcaatttaatacttataaaaaaaccaatgtataaacgttggagaatatgaacttatttttaactttttagtaatctcattgataaaaatatgctataatagtaaaattacttatcataataggcaaaatggctattatacatagataagattaaaatacaggaagttccattattatagtaagagatagtacattaagcgatattttgtgattggtaatggtaggaggaatatgttgtggaaaaaaatagagtatgtgacctgttaaaaatagaatatcctatatttcaaggtgctatggcaagaattgcagatgcatctttagcttcagcggtaagtgaggctggtggacttggaataataactggggcagcgccaactgaatgggtaagggaacagataaagaaaacaaaggaattaactaataagccattcggtgtaaatataatgttaatggcagaaaatgctgatgaaatagcagaattagtatgtgaagaaggcgtgtctgttgttacaactggtgcaggaagcccaggaaagtatatggaaaaatggaaggctcatggaataaaggttataccagtagtagcttctgtagcattagctaagagaatggaaaagtcaggagctgatgcaattattgcagaaggtactgaatcaggtgggcatgtaggtcagttgactactatgacattagtaccacaagttgttgatgctgtaagcgtaccagttatagcagctggaggaataggtgatggtagaggagtagctgcatcatttatgttaggcgctgaaggaattcaagttggaacaagattcttagtggcaaaagaatgtacaatacatcaaaattataaagataaagtactaaaagccaatgatatagatacagaagtgacaggaagaccaacaggtcacccagttagagttttaagaaataagcttgcaagaacttatcttaagttagaaaaagaaggagcatctgccgaagagttagaaaagcttggagttggtgcgcttaaaaaggctgttgtagacggtgatgtggataatggatcacttatgtcaggtcaaatagcaggacttgtttgcaaggaacaatcatgtaaggaaatgatcgaagaattatttacagaagcaaatgaaatatttaagcgttttggagggaatcatgaatagtagtaaaactgcatttctttttccaggccaaggagttcaaactattggaatggcaaaagaactttgcgagaatataccagaatgtaaagaaatattagatcgtagtgaagaaattttaaatatgcctatcaagaaaatgatgttcgaagggccagaagaaattttaacagcaacagaaaatgcacaaccaacaatacttgttgcatcacttatagcgttaaaagcactagagataaatggtattgaagcagattatgcagcaggccttagcttaggagaatatgcagcgctaatatacgggggagcactttctttagaagaaggattacttcttataaaagaaagaggaagaataatgggtagtgcgctaccagagggtcttggaaaaatggctgctgtgttaaaattaaatgatgaaaagatacaagagttattaactagagcaggtgaatttggaatagttgaaggtgctaactttaactgcccaggtcaagtagttatttcaggagaaaacaaagcaatagatgaagctgtaaaaattgcaaaagaattaggaggccttggaattccgctaaaggttagtggaccatttcatagttcccttcttgagcctgcaagtgaagaattctttaatactataaaaaatgttgatattaaagaacttaacaaagtagtttattcaaatgttaaagggcttccttatgaaaaagaagatgatgttaaagaattattaaagagacatataagaacatcagtcctttttgaaaagactataaatcatatgatagatagcggcgtagatacatttatagaagtaggtcctggaaaagcacttagaggatttgttaagaaaataaataagagtgcaagtcttttgaatgttgaggatatggattcattgaaaaatacaattgataagattaaaagcaatctttaatatataaatatatatttattaaaagcaagtctctacatttttatcttaactgacacttagtttactaagatttttaaatgtaggcttgttattgtaaaatataggaatagttatttagaatgagtagatagattataaataattatttgcagctcagttataggttaattgtttatagcaataggaggtaatttaatatatgctaaaaggaaaatgtgcgattgttacaggcgcatcaagaggaattggaaaggcaatagctttaaagcttgcatctcttggagctaatatagttttaaattatagaagtaatgaaaaagaagcattagaagttgaaaatgaaataaaaggcatgggtgtagaaactttatgtgtaaaaggtgatatatctaagtcagaagaagttgataatcttatcaattctgccaaagaaaaatttggtactatagatataatggtaaataatgcaggaatcacaaaagatgcattaataatcagaatgaaagaagaagattttgataatgttattgatgttaatctaaaaggtgtatttaactgcttaaaagctatcactccaattatgatgaaacaaaaacatggaaagataataaatctttcatcagtagttggaattactggaaatgcaggtcaagtaaattattctgcgtctaaagcaggagtaattggaatgacaaaatcattagctagagaagttggttcaagaggaatcactgtaaatgcagtagcaccaggatatatcgaaacagatatgacagaagctctagcagataagtacaaagaagagatgaagaagactataccgcttaagagattaggaaaagcaagtgatgtagcaaatgttgtagctttccttgcaagtgaaagtgcagattatgttacagggcaagttatccaggttgacggtggaatgttaatgtaatggaggaagtttgatttatggaaagaagagtagtaattacggggatgggagctctgactccgataggaaatgatgtaagtacgttttgggataatgcaaaaagcggaaagctaggaatagattatataactttagttgataaagatttagtagatgtaaaaatagcagcagaagttaagggctttgatccagatactttaataggaaagaaagaagcaaagagattagatagatttgcacaatttgctttggttgcatctgatgaagcaataaaaaattcaggaatagatttagaaaaagaaaatctagaaagatttggagtaatgcttggatctggtataggtggatttgaaactattgaaactgaatgtactaaaattgcaactggaaaatctaagagagtatctccatttttcgttcctatgacaataataaatttaggtgcaggaaatgtagctattaaatatggattaagaggaccatgtacatcagcagtaactgcttgtgcaacaggaacaaacaatattggtgatgcatttagaacaataaaacatggttatgcagatgtaatgcttgcaggtggagcagaagcacctataactagacttggagttactggattccatagtatgaaggcattaaattcaggaaataatccagaaagagcttctattcctttcgataaggaaagaggtggatttgtaatgggagaaggtgcaggagttgtaattcttgaatctttagaacatgctgaagctagaggtgcaaacatcatagctgaagttgtaggatatggatcaacttgtgatgcatatcatattacatctccagatccagaaggagcaggagcttcaagagctatggctgatgcgttgcaagaggcaggaattaaaccagaacaagtttcgtatataaatgctcatggaacttcaacagaattaaatgataaatttgaaacagcagctattaaaaaggcgtttggagaagatgcatacaaagttcctatatcttcaacaaaatctatgacaggtcatcttttaggagcagcaggagcaatagaagctataatatgtgcaaaggctcttgaagaaggatttatcccgccaacaatcggatataaaacaaaagatgaagaattagatttagattatgtgcctaacgttggaagaaagcaagatttagaatatgcacttactaactctttaggctttggtggacataatgccactttacttttgaaaaagtggaaataataaagatatatttggtaaaataaaaagtgttacatatattttatgccagaaaagttaaatgcagttaataagaaatattaacttttgaatgtgacttagtacggcataaaatatataaataatatttttgaataagatatatatatatatatatatatatattgcaaaaaataattcctaagaataattttaaaaatattacaagaatttcatacgtaaatgtgaattgataattgagcattgtgcattaagctgtgaattgtgcattgtgaattaaattatgaattgtgaattgtgcattgcaacatatataagaggaggatatttttatggactttgaaaaaattaaagagcttgttaaattggttgattcttcaagtttagccttttttgagcttcaaagtggaaatgatcatataaaaatggataaatcattaactagaggattagctgataatggtgcaggaaattatacaccagctgtaaacaatcaggttagcactgctgctagttcacttagttcagtagaaagatcagaaaatcatatagtggagaaagaagaagtaaaggctgctgaaaaagaagtagttatagacgataaggatgtaagtattataacttctcctatggttggaacattttactcttcagcatcaccagaaagctcacctttcgtagaagttggcggcacagtttctaagggaaaggttatttgcattatagaagctatgaaacttatgaatgaaatcgaaagcgaatataatggagtaatagtagaacgtttagttaacgatggagatatggtagaatatggccagccactgtttaaggttaagggggaataattaatgcttaacataaatgaaataaaagaaattataccacatagatacccaatgcttttaatagatagagtaactgaaatggaaatagaagaaaaacaatttgtaagagggtataagaatgtttctgcaaatgaagcattttttcaagggcattatcctgaagagccaattatgccaggagtacttcaaattgaagctttagctcaaacaggggcagtagctattctttcaatggaaaaatttaaaggaaaaactccgttatttgcaggtattaataaagcaagatttaaaggcaaagttgtacctggcgataaattagatttatattgtgaaataataaaaattaaaggacctgtaggtattggaaatggaatagcatcagttgatggaaagacggtttgtgaagcggaaataatttttgcaatacaataggataggtgataaagatgttaaagaaagtgctaattgccaacagaggagaaattgcagttagaataattagagcttgtagagaaatgggaataagtacagtagctgtttattcagaaatagataaagaagcacttcatactcaacttgcagatgaagctgtatgtattggttctgcaatgcctaaagatagttatttaaacataacaaacattctaagtgcatgtgttttaactggagctgacgctatacatccagggttcggattcttatcagaaaatcctaaattcgcaaagatgtgtagacaatgcaatattaaatttataggccctgattatgagacaattgagcttatgggaaataaggctaaagcaagagaaatcatgaaagcttctggtgttcctgtggtacctggatatgaaggcgaaataagagatgaagctcatgctttagaaattgcaaaaggtattggatacccaataatgataaaagcatcagcaggtggcggtggtaaaggaataagagttgcacataatgatgaagaattcttaatgggctttaaaactgctaaaacagaagcaaaagcttgttttggagatgattcattatatatagaaaaatttgttgaaaaaccaaagcatattgagtttcaaatattagctgatgaacatggaaatgtaatacatttatgcgaaagagagtgctcgatgcaaagaaagaaccaaaaggttttagaagaagcaccatcaaatgtattaacagaagaattaagagctaaaatgggtgaaattgcaaagaaagcagctctagctgtagattataagaatgcaggaactatagaattcttgtttgatagagataataatttctacttcatggaaatgaatacgagaatacaagtagaacacccaattactgaaatgattacaggtatagacttagtaaaagaacagttaaagatagcttcaggagaaaaattagcttatactcaagatgatataaaaattaaaggtcatgcaatagaatgcagagttaatgcagaagatccagaacatgatttcagaccatgtccaggaacaatcgaagagctttgtgtaccaggaggtatgggcgtaagagttgattcagctatattctgtgggtataaaattcctcattgctatgattcaatgatagctaaattaattacttttggtgataatagaaatgaagctattgtaaaaatgaatagagcattagcagaatttgcagtaggcggtgtaaaaactaatattgattttgaattatcaatacttcatactaaagaattcttagaaggagattatgatacttcatttttagcagaaaagatggtgaagaagaatgcttaaggatttatttgtaaaaagacaatatgcaactgttaaatcctcaacgttaaaaaagagtgtttctgaagaaaagcctaatataccatcaggtatgtgggagaaatgtgataagtgtaattcaatgatatatgcagaagacttagagaattctaagttcgtttgtgcaacttgtggtcatcattttagacttaatgcaaaagaaagaataaaagtattttttgataaagatacttttagggaattctggaaagacttaaaaactactaatccattagattttaaaggctatgaagaaaagttaaaaaacactaagactgatagtacagaagctgttgttactggagttggaaagctaaatggtatagaagtagcatgtgctattatggatagcttctttatgatgggaagcatgggaactgtagttggtgaaaagattacaagacttatagagcatgctacagaaaataagcttccattaatgatttttacagcatctggcggtgctagaatgcaggaaggtattttttcacttatgcaaatggcaaagataagtgcagctctagcaaagcatagtgaagctggtcttttatatatttctatattaacagatccgacaactggaggagtaactgcaagttttgcaatggaaggtgacatcattttaagtgagccgaatgcattaataggatttgcaggaagaagagttgttgagaacacaattaaagaaactcttccagataattttcaaaaagcagaatttttacttgaaaaaggttttgttgatgccattgttgaaagaaagaatatgagagcatgtatatataaaattcttattttgcatggagtgaggaattaattatggataaagattttatgaaaattaatgtaacaccatgggaaagtgttgaaatagcaaggcacaaagacagaccatctgggcaatattatatagaaactatatttaaagatttcattgaatttcatggagatagaaactttggtgatgatcaagctataattggtggaatcgcatctattaatgatataaatgttacagttatagcaatcacaaagggatcaaatactagtgagtatataaaaagaaattttggaatgcctaatccggaaggatatagaaaagcattaagacttatgaagcaggccgaaaaatttaaaaggccaataatttgttttatagatactatgggagcatttccaggtatgggagcagaagaaagaggtcaagggcaggctatagcaaataatctttttgaattaagtagattaaagacaccaataatttcaattataacaggtgagggcgaaagtggaggagctttagctttagcagttgcagataaaatctttatgttagaacattctatatattcagttctttcaccagaaggatttgcttcgattctatggaaagatccaagcagagttaaagaagcagcagcagttgcgaaaattactgctaaagatttaaagggttttgatataattgatgatataataaaggaacctagaggtggagcacacaaaaatccgcttaaaacagcagaggctcttaagaaaacaattgtagataacttgttagaattaaaagaaaaagatttaaatgaactaatagataatagatataataaattcagagctatgggaaatttttattaattatatttctagttgcgatatattttatatagataaacaatatataacctggatttatgcaataatccaccaaaagtaaaaacattgttattgattgtgttatctatagattataattgatttatatatggcaagatttaatataggggctaaagggtagagaaatactctttagtcctattttttgcttacctataaattatcagattattttgaagtataagaaaagttattgtgatataatgtgcctagagaatactttggaggtatcagattatggaaagtaatagtactagagttgcaaagatagctgccaaaatggctatatgcgatagacatgaagaagagcatttaaagaaagtatatgcagagaaaggaattaaagttacggcagtaaatgtaggtggaaatataaattcgtcaatagctaaaatattagagagtgcattagttgctgcaaaaagaaacgagttaataagagaagagcatttacatgaaggcgctgttataggtgcaactagagatgcggttattcaagttgcaaatagagcaaatggtcaaaatgtaggtgggaaaatcggaatagctagaggtggagaacatatttcagtatgcatattcttaagtattggacttttgcacttggatgaagtagttataggaataggccatagagcattgccgatttaacaattcacaattatcagttcacaatgcacaattaaggaggaaaagccgtcagcttttctaaataaatatattgaaatcttaattttacattatgcaagtaagataataaaatgctgaaagtattttattatcttgggtgaaaaacaaaaaagaataatacaagtatactgctgatttacatatatgaaagaaaagaggctgttgctaacggattttaatccgttaatgcgacagccccttttttgatgattccttatatatatgaagaaaatagcaattcacaattatcagttcacaatgcacaattaaggaggaaaagccgtcggcttttctatataaattttattatcatattgctaatttaggttataaatctttagttgtttatttaaatttaatagcaatttagcatgaaatttacacaaatatatattgaaatcttcattgtgcattgtaaattgtgaattgaatattgtggatcgtgaattgatttataatttttacaataaaaaactaaaaaagcttgcaaagtataggtagcaactttacaagtatttcaaaatatgatatcataacttaaaagatttataaattattatcaatttatttgaatatttatcataaatatagatatatatttatgattgtatttattgagaaggtagttggcattttggagtatagtaggaaattgataataagaatatagtaggaggatagaaatatggtaggaaaaaagaaagcagccatgctgctatgcacagttttagttggaggaattcttgcgggatgcggaaaaagtgcaacggattctaataatggaggtactgcatcatcggcagtaaagaatattggagtaattcagttggttcaacatgatgcgttagatgcatctaataagggatttgtcgatggattaaaagacaagggatatgaagaaggtaagaatatcaaaatcgaacaacaaaatgctcaaggtgaacaagctaatgcgcaaacaattgccaagcaattcacagatgcaaagaaagacttgatttttgcaattgcaacaccagcagttcaagcagcttataattcaactaaagatattccaataatattcacagcagtaacagatcctgttaaagcagaagtagcaaaggattggaagagttcaggtacaaatgttacaggtacatcagataaagtccctgtggacaagcaaatagaattattaaaaaaattacttccaaatgctaaaactgtaggagtaatttataacacttcagaaacaaattctgtaactcaagttgatgagcttaaagcagctgcagataaacaaggcttagcagtaaaagaaattggtgttacaaatgttaatgagataaatcaaaatttagcaagtgccttaagtcaaatagatgtattatatacacctacagataacacagttgcttcaggatatgcgttagtaggtaaactttgtttagataaaaacgttcctataataggtgcagaagaagcagtagtaactaaaggtggacttgcttctataggaatagattactacaagctaggaaaagaagctggatataaagcagcggaagttttagatggaaagaagccatcagatgttgaaataagcacattaagcgatatgtcatttactataaacactgatgtagtgaagaaattaaatataacacttccagcagatatcgaatcaaattgtaaaaaagtaactggaggcgttgagtagtgggtgttttaataaatattttagaacaagggctgctattttcattagtttcaatcggagtatatataacttataaaattttagattttcctgatttatcagtggactctacattcccacttggggctgcaatttccgcagctcttttggtaaatggggttaatccatggattagtataataatagcaaccttaggtggagcattagctggaggaataacagcatttttgcatgttaagcttaaaataacaaatttaatggctggaatattagtaatgatagggctatattctattaacttaagaataatgggaaaagcaaatgttccattatttaatactgctaatttatttaagtcatcaattccggctatagtagtgattttaataatggttattgtagttaaaatactattagatttatatttaaaaactaaatcaggatttttgcttatagctgttggggataatgaacaagtagtttcatctcttggggtaaataaagatttggttaaagtgttaggtcttatgataagtaatgcattagttgcacttgctggggcactaactgcacaataccaaggatttagtgatgttggaatgggaactggtactgttgtaatggggcttgcagcagtaattataggaacatcattatttgagaggttgtcttttattaaagtgactaccttatcaatactaggagcaattatatataaggcggcaatagcaatagtattaaaacttggattaaatgctaatgatttaaaattaatgacagccataattgtagttatagcattatgttctaatagcggtgccttcaagtttaagaaaagaaaatctgttataggaggtagtgctaaagatgttaaaagtgaaacaactatccaaagtgtttaatccaaatacaataaatgaaaataaggtatttgatagattatcattagatgttaagcaaggtgacttcataagtataataggttcgaatggagcaggtaaatcaacattattaaatatgatatctggaactcttgaggcagattcaggatcaatattattagatggtgatgaagttgttaataaacctgaatacgcaagatcaaagtctattgggagggtttttcaaaacccatcaatgggtgtagcacccaatatgacaatattagaaaatatttctcttgcagataataagggaaaatcctttgggcttagttttggaataaataagaagaggatagattattacaaagagatggtaaaagaacttaatttggggcttgaagataagctgtataataaagtgcaacttttatcaggaggacagaggcaagctttaactctgcttatgtcagtaatgtctaaacctaaattattattactagatgagcatacagcggcactagatcctaaaacatcagaaataataatggatataacaagaaatatagtgaaagacagcggaataacaacccttatggttacccataatcttaaacatgctcttgaaaatggtaatagacttttcatgatgcatagaggcaagattttagttgacgtcaaaggggaagagaaagaaaagttagataataataaacttcttggactttttgaaaaagctaatggagcagaagctttaagtgacaggacattatttggataaatataaaggataagcagtaagaaactttaatgaatcttactgcttattttgttgtatatatacatgttgaaacaaataactattcatgataattcagaaaatattccaagaactgtatccctaattatgaattgtgcatcgtgaattgtgaatttaagattgtgaattgtaaaatgtgaattttataaaaaaacataacaagtttaattacaaaatataacttatagaaaaattattgtaaaatattttgtttttttatgtctaatttaaatactaagtataatataagaaaaaattatgatataatggtaaatagtgatgttattaaatttaattaactatttagggggaagattttgttgagaagattgatgaaattaatgatgtgtgtaattttggactaaacctttgctgcttattatttgaaagaacgatttaaatcgagaaaaacttttaggacatgcatttaaaaatagaaattatagggagtttgacagatgaacgaagaaaacataagaattgaagaatccattaggatcgaagaaataataaatatattattaaaaagatggaagatgatactttcaataactttacttgcaacattaacggccggaattattagtttttttgtaattgcaccaaaatatgaagcaagcacaaaggtatttataggtaaagaaaagacagatagcaaggatcaaaattataataatagtgatattcaaatgtatcagcaattattaaaaacttatgcagaagttataaaaactaatgccttagttgagaaagctattaatgctgaaggctttgatctgacttctaaggatgtacttaatgatttgactgttacaccagcagcgaatactcaaattttggaaataaaatacataagcaaggatagaaatttaagcaaagaagtactagattctataacaaatcaattcataaaaacatctacagagcttattccaaacggtaatgtaaaaatagtagagcctgcagaattgcctgaaaatccagctagtcctaataagaaattaaatattgctattgcatttttacttggacttatggtaagcgttggattagcatttttattagaatttttggataatacctttaagagtaaggatcaattagagcaaatattaggaatccctgttattggtgcaattcctgaagatttggaatagggggataaaagatgttttcagcaagaaaattacataaagcagtagaaaatcaagaatataggggcttcgtagttgaaaaaaagccaaagtcaatagtatcggaagcctatagaacactaaggacaaatattcaatattcatcatttgataagacaattaaaactattgtagttacaagtgcggaagcagcagaaggaaagtctaccgtgtcaggtaatcttgcattatcttttgctcaaaatgaaaagaaagttataatagttgattgtgatttaagaaaaccttcagtacataaaaactttaaattatcaaacttaagtggattatctgaagttcttataggaaaagaaaatttagataatgtaatacaaaatcgtaatgaaaatcttgatatattaacatctggtaagattccgcctaatccatcagaaatgttatcttcaactgccatgactaatttaatacaaaaattaggagagaaatacgatatagtaattttagatagtgctccacttcaagccgttacagatgctcaaattctatctacaaaagcagatggaactatacttgttgtaagagcgcaaagaacaagtagagaatcagtaattgatgcaaagaatttattaactaaagttggagctaatatattaggaactgtactccatgcagtagaaaatactaggggtaaatactactattactatggaagcagtgaagaaggtaagtagatatccagtgtgaaaactaagtgttagtgtgtatttgccgaaagaagaggtactctgttgtttcggtttctagagaatgcagctgcggatttctaacagtagaagttgtaccaatttctgcatgctcctgcgataaacgcatgacaagcaaaaattaaacaacttctactgaagaaatacctacagctgcattctcaatgaaacactacacaaaggagtacctcttctttctggtatgaaagtatataattacagtttagtccataatgtaacacttccacaaaagcaagacctttatttctagtatagaatatattcaggcatagatatagtttggagtattgatatctacttgggtcgagtatagataaaagattataatttctagtaaagatatgaatttaaagttttagcagatttgtttatctaataagttgaagattttaattgcgtatctatgtaaattagttttgtgagtatatttaccgaaagaagagggaagctgttgctttgggatgattgattttttattttagaggagagggatagttatgatagttgatattcattcacatataataccggggattgatgatggttctaaggatatggaaatgagtttggagatgcttagaaatgcggaaaaagatggcgttaaagaaattgtggctactcctcattacttacttgagtatggagaagctacaattgatgaagttaagagttatgtgaaggaaattaataatattttagtaaaagagaacatagatataaagatatatagtggtcaggaagtttattatagtgaaaagataatagaatattatatgcagggaactattggaactataaatgattctagatatatgcttattgaatttccaatgagaaagtttgatgaaagtatatttgatactctttatgagcttcaagtgagaaacatagtaccagtaattgcacatccggaaagatatatgcctattatagaagatcctaaaaatattaataagttcattaatgaaggttatttgttccaagtaaatgctggaagtatagatggaagatttggagaaaaagttcaaaggacagccaatgtgctcctaaataatggtacatataactttataggttcggatgctcataatattaatagaagaaatactggtcttagtacggctttgaatttaataaataaaagtgaaattaaggatgtatttaaagacagttctgaaaaaatgttaaataatggggagataaagttttcaggagagaaaatcaaagaaaaaaaatcgatattttggttttttaaaagataagtccattattagatgtctaatgatggaagaaatttcatgggatggattgtcgaatcaatattaacaaattattaattatgtggtataatctgagacagagatacgttgaaccatatatttaactgggcactttatatatggtgagttattagtgcaaccggctttaatttaaattaaaggtggttgttttttatgaatgaacaaggggaagtttatttttctaaaaataatacggtttagggggagtagtatgcagcagttagaatttaacagtgaggaagttttgtttaaagaacaactggaaacagaagacagcagaataggatattgttttttaaagagaactatggatgtggtttgctcatctattggacttataattttaagcccaatatttttagttacagccattttaattagattggaatctgaaggaagctcaatcttttcacaagagagagtcggaagaaatgggaaaaaatttagaatgtataaatttagatctatggtggctaatgcagaagaactaaaggacaagctaagtgctaaaaatgaaatgaatggaccaatgtttaaaatgaaagaagatccaagagtaactaaagtaggaagatttataagaaaaacaagtatagacgaattgccacaattggttaacgtcttaaaaggtgaaatgagtttagttggaccgaggccatcacttccaaaagaagtagtgaaattcgaagattggatgatggaaagattaactgttaaaccaggacttacttgctactggcaggtatctggaagaagtgatattggctttgaagattggatgagattagatgttaagtatgttagagagagaaatactctagttgacataaagctggtattaaaaacatttggggtgttttttggtgatgaacatgcaagataggggaagtaatatgaaaatagtagtagcaggaacaggatatgtaggattggttacgggagcatgtctttcagaagttggacatagtgtaacttgtgtggatattgacgaaaaaaaggttcaaaagatgaaagaagggatttcacctatatatgaaccaggattagatgaacttttaaagagaaaccatgatgaagggagattagattttacaacagattacatcaatgcatataaggatgctgatttagtatttataggagtcggtactccagaaagagaagatggttcagctaacttagattatgtgtttaacgtttgtaaacagatagcagagaatgtagaaaaagactgcttagtggtagttaaatcaacagtgccaataggtactaatgataaggtagaggagtttttaaaggaaaacgtaaaaaataatgttcatatagaagtagcatcaaacccagaatttttagctcaaggaacagcagttattgatacattacatgccaaaagaatagtaattggtgttgaatcaaaaaatgcagaaaatattttaagagaagtttatgaaagatataatcagccaatagttgtaacaaatagaagaagtgcagaaatgataaagtatgcttcaaatgattttctagcacttaagatttcttttatgaacgaaatagctaacttctgtgaaatagttggagcagatgtagaagatgtagctaaaggaatgagttttgacccaagaataggagataaattcttaaaagcaggaataggatatggcggatcatgtttccctaaagatacaaaggcacttcattggttagctaatgacaatgggtatgaattaaaaacaataaaagcaacaattgaagtaaaccagaatcaaaaatataaattatttagagcagcaaaacaaagacttggttctttaaaaggattaaaagtagcagttttaggtttgacatttaaaccgggaactgatgatttaagagaagctccatcaatacctaatgtcagaagattattagatgaaggtgcagaaatagtagcttacgatccagtaggaattgataattttaagaaagtttatccaaatgaaatagaatacgtaaatacaccagaagaaacattaaaagatgcagatgtcgcatttatatttacagaatgggatgaaataaaagaagtagatttaaatgtatatgtagaattaatgaagactcctgttgtgtttgatgggagaaattgttatgcaataaatgaggttgaaaaatttggtgtagaatatcattcggttggaagaaaagctattttaaatttagaaagtgatattaatggagaagttgcagcaacaacgatgacacggtaaaaagattagatgagggggagaaaaatgctttgtgctttaataatggcaggaggtaaaggaacaagattttggcctttatctactgaagaaaaacctaaacagtttttgaatttaattggaaaagacactatgatacaaatgactgttaatagaatcaaacctattataccgatcgaaaggatatttgtttgtactggacaaaaatatgtaaatctagtaaaagagcaattaccagaacttccggaaaagaatataatagtagagcctgatggaaggaatacaacaccttgtattgctttatcagcatttgtcataaggagatattataaggatgcaaacatgattgtactgccttctgatcatctgataaaagatgaagataaatttagggatatagttcaaagagctaatgatttcttgggaaataatgaagaagcgatagtgacattaggaatgaaaccagatagacccgagacaggttatggttatataaaatacacaaatatagcagaagggaaaaatgaatttaacatttttaaagttgataagtttgttgaaaaacctaatgaagaaaaagcaaaaaaatatttagaagatggttcatatctttggaatggaggaatgttcctttggaagatttctaacataataaatgaaataaaaaaatattcaccagaaacatatgaagctattcatgaaatagaagttgtaaaagaagaatttttgcaagatttaataaatgataaatatcataaaacagaatcaatatcaattgattatgcagttttagaaaaatcaacaaatatacatgttgttccaagcgaaattggctgggatgatataggaacttggaaggctgtagagagatacaaagaaaaagatattaatgataatataatctatggtaatgcaagggtaattgaatctaaatgtaatatagctattaatagctgcaagagagtagtaatgataggtatagatgatgttatgactttagagacagaagatagcatttatattgttaataaagagtatatggagaatcttagagattatcagaacatagtttaaaaataaatcatacgaaagttttggagtaataaatgagtagaattacattcttgaatacagaaatagataatttaacaatgtcagaagccataggagaaatagatagacttgtgattaatagaaaaccaagttatgttgttacacctaatgttgatcatatagttaaattagaaaaagatgaggaatttaaagaggtatataaaaatgcagatttaattctaacagacggtatgccattaatatggatatcaaaaatgaagtcaacaccaataaaagaaaaagtatctggatctgatttgtttcctaaagtatgtgaattagcagctaaaaaagggcataaaatatttcttcttggggcggcagaaggtgttgcagcaaaagcggccgagaatttgaagaaaaagtatgcaggattaaatattgtgggaacatattcacctagttatggttttgaaaaaaaagaagatgaaattgaaaaaattataaaaattataaatgaggtaaaaccagatattttagcagtaggactcggagctccgaagcaagaaaagttcttatataaatataaggataagtttaatgtaccagtttcattagctataggtgctagtatagattttgaagcaggaaatatagaaagagcacctgtatttatgcagaagtgtgggttggaatggttttatagattgtgtaaggaacctaagagaatgtttaaaagatatataattgatgatatgaagatcttgggcttgattttaaagtatagacgataggaatgattttttatgaataatctagtaataaacggaatgttttacgctcataaaataacaggtgttcatagattcgctagggaattaatgactgaattagataagttgatcgaaaaagaggaaattacaatagtagttccttattatgtaaatgaattaccgatttttaacaatataaagattgtaaaatatggagaaacaaaaggacttctatgggagcagatagatcttgttaagtatttaaggaaaaatgaccttgttagcattagtttatgtaatactcaacccctattgcgtccaggtattatgtgcattcatgatgctgcatataaagttcatccggaattttttaaaacattgcatgggaaactatctgtttattggcatcgagtaaatttttggattgcaaaacacacaaattatccagttataactgtatcgtatttttcaaagtatcagctgattgatgcatatagattaaatcctaaaagaataataatcataggtaatggatggcaacacatgaatagggttagcagtgatgtaagtgtattatcacgaaataacctaaaagaaggagaattcttttttacgttagggaatatcaattataataaaaatacaagctgggtaattgactttgcaaagaagcatccagagcatatgtttgttttaagtggcattagagtaaagaatagtaatgttgatatcgataatataaagaatgttaagtggcttggctatttatcagatgaggaaattaaagcattatttcagacatgtaaggcctttatttttccatctatacatgagggatttggaattcctcctatggaagcattaagccaaggtgcaaaaatcattgtatcgaatacaactagtcttccagaaatatataaaaacagtgcctattatgtagatccttatgataatgatatagatattaatgaattatttaatactcaattagatgacgcatctgcagtacttaataattattcatgggaaaagtcagcaagaaaactcaaaaatttaatcagaacatataataaaagtatttaaaaaatttgatttatacatatttcagaatgtgaatggtgaaaaaatgaaaatatttattattaatacatattattatcctaatatggttgggggaacggaacatagtgtaaagctattagcggaaggactagtttcagttgggcatgaagtttgtgtttactcaattgataatttaacttcaagcgaaattataagcgaaaatattaatggagtaaaagtatatcgaggttgtgcaggattatacgatattaaagttaagatgagattaaagcataacaaagttaaattattacttaacaagttggttgaattgaataataggggatgtattagagaaattaaccacattattgatgaatttaggccagagattattcatacaaataatctttttggtatttcggcaatgatatggaggtcaataaggctgaaaaatataccaattatgcatactgtaagagattattggatgattacccctacatattcattagattatttaaagaaaggtaaatttacattaggcgttcataaattatatcaatggtattatagaagactaagtgaaaatgttaatatagttacggctgcttctgaatttaccttaaataaatttttggaatataattattttaataatgcaaaaagcattagtatcaataattgtgtaaaaatggataagaataaattatcaagaattgttgaaaaaagaaagtacgataagaatagaaaagttggatttatttatgttggaagtttaattgaaatgaaaggaattgatcgactcattagtgcctttcgagaaataagaaatgatgatattagtttggttatctgtggttcaggtccattggaaaacatggttaatgaagctagtaaacgtgataagagaataatatataaaggacaagttaaaacagatgaattggaagaaatatttttagataatgatgtacttataataccttcagtttttgaagagccgtttggaagagttgttattgaagcaaatattaatggattacctgttattgggtcctcaagaggaggaatagttgaaattataaataatataaaaacaggtgttttatttgatattgataataaaaatgatttgaaaaagcaaatagaattatttacaaatcgtgattatataaaatcattttatcagccaatattagatggagtatatgagtattcactagaggaacaaataaagaaatttattagagaatataaattaatattaagaaaataaaaatcaatttgaaatgtgtctacataaaagtctaacgcatggtaaacattaaaaaaagtattagttagatatatcttaagtgaaataaatataatgacatgtgtttaataaattattttacttaaacaataaggaatagatttaaggagtaaatttacaatgcctaaaatagtgtttataatactacattatttaacatataaagatactgttgagtgtgtgcaatctataaaatctaatgttatttataataattacgagatagtaatagtagataataattctaataatggaagctatgaaaatcttgtgaaaacatataatcaagatgtgaaaataaatttaataaaaaatgaaaaaaatttaggatttgcaaaaggtaataatataggttatgtttttgcaaaaaatgaactgggagctaattatattattgcaataaacaatgatacgttaattgaagataaggaattccttaataaaataatacagagttttaaagaagaacaatattatattttaggtccagatatcttatcattgcaagatggaggtcatcaaaatccattaagaaaagtgttaaattctaaaaaagaattagttaagaaaataataagattaaatgttctattagtactaaattatattaagttagaaaaattaactaaaaagctaagagaagcaaaaagtaaagaatatattagggatgaagaaaagcgactaaagcagtttgatgaaaagcaaataaatgttccacttcatggatcatgtattattttttcaccattatttataaaaaaatttaattatgcattttatcctgaaacatttttatatttagaagaagatatattattttatatctgtacaaaattaaaactaaaaactatttataatccacaaataaaaatatatcacaaagaagattcatcaacaaatatttttttgggaaataatagttcgaaaaaagaaaagtttattttaaaaaatatgatacattcttctttagaattttataaattaataattaaatttaatatataagttctgattaataaaattcattgcttgttaactcatgtttatattattggataagtttgcacaaaataaatctagatttattttgtgaggtgagcctaatgatggatttaaacagaattaccatagaagataatcagagtgcagtattagaacttgaaacagcaatgacagaaactaaaagtgtacgaatgtataagcggtactctgtagttttaaaacacttccaaggttttcaaaataagataattgcagaaatggaaggattagaagagcatgctgttggtaactatattaaaaaatataaggccaatggattagaaggtcttgctatgaaaaagccacctggtgcccttagaaaattaaattctgagcaagaacaaaaacttatttatgtaataacaaataatacgcctgacgaagtgggttttcaatcaataaaaaactggactatcaaactaatatgtcaatggatcatggctaattttggcattactataaaacatagtagtatggcagttatacttcacagattaaatttgagttatacaagaccaacatatgttttaaaaaaggctgataaagagaaacaagaaactttcaagaatgattttgagtatctaaaaaaaacaccttgatggcttagttgatactatattgtttcaagacgaatcaatgataagagattatcaggccattcaaaagacttggtttataaagggcaaacaacgaaagatacctacttatggaaagaatgcaggcgtaaaattaatagggatactagattatgaaaatggtcatgtatgttgtgaagaacatgaaaaatatgatgctgtagtttttcttgagtttttaaagaaggtgcttacgcaatacccgaagggtaagatcgttattattcttgataatgctaaaattcatcatgctaaattgatacaaccatttttggaaaaactgaaaaatagacttgaattaatgtttttacctccatacagtcctgacctaaatctaattgaggggttatggggagggttaaaatcatcagtggtaaataatgtattctttaaaagttggactagtattcgagttgctatacaaaacttcatcggaacaataaataaagttcctacacaaacaatagacagtctatgcgttaaaatgtagtaactttattagaacttattatagtaaagaattttttggaaattaaactttttttataatgatttagattgaaagttaaagtattaggatgggagaatattaatgaatattggtgtagtaatagtaacgtataatagaaaagaaaaattaaaaaaagctttagaagcatatgaaaatcaaactcttaaaccatcatatattattgtagtagacaataatagtaatgatggcactaatgatatgctcaataaatggaaaacagaaaagggtgaatttacaaaatatattttaaatttgccagaaaacataggtggaagtggtggattttatacaggattaaagaaaggcttggaacttaaggcagattggatatggatatcagatgatgatgcctatccggaatatgatgcatttgagaaagcttcaaattatataaataaagaaaatattgagaatgatagtaatgttgcagcaatatgtggtcaaattattaataatggaaaaactgatataacacatagaaaaagaatagttaaaaattttattaatattgatttagttccagttcctataaaagaatataataacgagaattttgaattaaatttattttcatatgtaggaactataataaataaaagttatttaaaaaaagctggattacctgaaaaagattatttcatatattatgatgatacagagcactcatatagactcaataaattaggaaaaataatatgtattcctagtgtcaaaattgttcatgatgtatattcaagaacttccgaggatgttaattggaaggagtattataccgtacgaaacaaacttctttttttaaaaaaacattttaattcaagatattataaatatatgtatgtaaaacaaacatttaaatgtatattaagaagagtcgtaaaaataaaagaaataagaaaaacacaaatccgaaatacacaaattagaactgcacttaaagatggaagcaaagaagctaagggtatacataatttatataagccaggatggaaaattagtatataaggagataaataatgttaaagtatgactatttaataataggagcaggattatttggggctatatttgcctatgaagcaaataaaatagggaaaaagtgtctagtaatagataaaagaaatcatgtggggggaaatatatatactaaagaaatagaagatattaatgttcatgaatatggtgcacatatatttcatacgagtaacaaacaagtttgggattatataaatgattttgctgagttcaatagatacaccaattcaccagttgctatttataagagcgaactttataatttaccgtttaatatgaatacatttaataagttatggggagtaaaaactccaccagaggctaaagctaaaattcaagaacaattgttagaaagtaatataggtgaacctaaaaatttagaagaacaagctataaaacttattggcaaagatatatatgaaaaattggtaaaaggatatacagaaaagcaatggggaactagagctacagaacttccagcttttattataaaaagacttccagtaagatttacgtatgataataattatttcaacgataagtatcaaggtattccgataggtggatataccaagattgttgaaaaaatgcttaaaggaatagatgtaaaacttaataatgatttctttgacaatagagaagaattagaagctttagcagataagatagtgtttactggaatgatagatgaattttatgattataaatttggaactttagaatatagaagtttaagatttgaacatgaaatattaaatgaagaaaatcatcaaggaaatgcagttgttaattataccgaatatgaagtgccatatacgagaataatagaacataaacattttgagtatggtactcaacctaaaacagtaataacaagagagtatccaattaaatggaataaaggggatgaaccgtattatccgataaataatgataaaaataatgaaatatatagtaagtataaagcgttagctgataaagaaaataaggtgatttttggtggaagattagcggaatataaatattatgatatgcataatgttatagaacaagctttaaaatgtgttgaaagtgaattttaaagatgaggaaaaggaatgtggagaaatataggtcataattaaaaaatactagatttggttaaggtggtattaaatgaagaataaagtaacaatatcaaaattatttttttatgtagcttatattatatggatgattacgtatattcttaaccaaacatattatagagaagtgctttcattagatatagtatgtaaaattgttagaataattgtctatacaattttatttataaaaatattatatgataatatatataatgctaaaacaatgtttgctattatttttatagctttactattagtaatatcctttaattcaggaatatcaattttgattgatatatttttatttatttattcagtaagaaatttaaatattagaaatgtaataaagttaacactgtttatacaaatatttatgatgggatttattataataagcagttattatggaattattgtgaatgatatatggtatagagatgacggagggattcgttatggattaggatatacatattgcacttttatagctaattattactttcatattatattaatgtatttatatttgaaagatgagagtaaatttactatttgggaggcgataataattttatttattaattatattatctatactatgacagatacaagagcggtattttatttaatatctcttacatcaatattagcatatagcattaattttctaaaaaatccattaaagaacggaatgtttaataaattaatttttaaatattgtttccctatttcagctatattttcaatagtaataagtattaattataatatttcaaatccagtatatgttgaattgaataaattgttaagtgggcgtttagcactaggcaagaatgcttatgaaatatttaacatttccttactaggtcagaaaattaattggattactggcagagtaggaattgaaagaagtttttatgaagtttataattttgtagattcgtcatatcttaatattgcaataaattatggaataattattttagcacttgtatgtataggattcgtattagttggaaaatatgcaattgaaaacaataaaaaatatatttgcttattattactactattagctattcatagtatatcagatccacaattaatacaattggaatatcatccttttttgttgacgtttggaattttctttaagtcttcttttaaatatcatagaagtgacaaaattacctttaatttatggaggaagaggaatttggcataaagatttttagaactatagtagtattaaaattaaattggaaatgaatatagtaggaagctatatagtttaattatcatatagtaaataatttttatttatataagttgcaataataacattacagaatgattaatggtgtaaatataaacattaattataaaatgtgacatatttaatataagctatatacaaagttgacctaattgatgaagatatatataaattttagaaattctaaaaataacttataaatttattagtcgtaaaattattgcaataaaatacattgttatagtttagaaatcttactgaataggaaagtctaaaaaatgaaaggtaattaaaaatgagtaaaagcataacaaagaattttatatataatttattatttcaaatagtaactttgtttatgccattaataacagttccatatgtatcgagagtattaggtaaagaaggggtaggtgtatatagctataccctttctatagttcaatactttgttattttaggttcacttggagtttctatgtatggtaatagacaaattgcttatgttagagatgataaagagaagatgtctaagactttttgggcaataacaatcctaaaagttataacaactgttatatctttgatagtctacatatttatttttggatttaacaagaaatatggaaatgcgtatttaatacaagctattaatattctagcagttacaattgatatatcatggttatatatgggactagaagattttaagaaaacagttactagaaatcttttagtgaagataattggagtaagctgtattttcatatttgtaaaaagttacgatgacttatataagtatataagtataaatgcttttatgatttttcttggaaatttagtaatgtggatgtatattcctaaaatagtttcaaagatcaaaataaaattttctgatatagcagaacatattattccaacagtacaactatttataccacagattgcaactcaaatatatctagtattagataagacaatgcttggaactttagctaatactggagaagttggactttatgaacaatctgaaaaaataattaaactagtattaagcttagtaacttcgcttggagttgttatgctacctagaatgagtaatacttttgctagcggtgataatgaaaaattaaatgtatacttaaataagagcttacaaggagtatcctatgtatctattccaatggcagtgggattggcagctatatcaaatgaatttgttccttggttttttggaaaagattttagtgaagtttcgtatttaatggttattttaactccagttctctttttcatagcaattagtaatgtactaggaattcaatatttattgccaacaaatagaacgaatgagtttacgctttctgttactatgggtgcaataataaatgtggtattaaattttatattaataccacaatataaagctgttggaacatgtatagcaacagtgattgcggaatttgttgttgtcttagttcaatatatatcattaagaaaaaatatcgcaacccccaaattgttaaagagtatatcacaatatatatttgcagcaatatgtatgtttattgtagtaagattaataggaagttatatgggagcaaatattataacaacaatagttcaaggttttgtaggagcagttatatacttagtaattttaatattattaaaggaagaagttaattcaagtataatgaattttatagtttcaaaagtttaagaaggagtagggtgctatgaaaagaaatataggtctagattcattaaaagttttaggctgttttgcagttgtaatattacatgtaagtgatagaagctcggatttattaaatttatttttatattatatggcaagttgtgcagtaccaatattttttatggtaaacggtaatttattattgaataaagataaattagattataattatgtttttaaaaagatattaaatatctttaatatagtttttttatggaatctggttttatttggaattaaagtgttgattaagcatgaatttactaatccattatatattactatggaaaactttctacaaaaggaatatttttggcaattttggttttttggaggattaataattatatatttggtattacctattatctataaatattataaaagtttaaaaggtgctattataattaccggaacatgtatcgtcatttcgttatttattgacctagcaagtatttttagagcaaatttgggttattcaataatacaagtacatataatacaaacatttagaatatggacatggctatcatatttcttgattggcggattgataggaaaatcaaatatagaagatttcttaaaaagaaatataactttgcgtaataatattattattgttattacaatgacaataggtactattttatatcaatataatatggctaagtatatatataaaataaaatatgcagaatatttttatgataatattctaacatttatttgggttagcagcttatttttattattatatagactaaattattcaaatttaaaatctaacattatatacggtattggcaacaatataatgggaatttatattatacatgtaacaatgataaaaataatcacccatttttatggttttcaatcatcatttgaaaatatatttctaatttttttggtttttatgagttcacttatactagcaagttttataaatatgacacctatcattaacagattagttcgaatttaagaatttgaaggagtaatagtatgaaagggattatattagctggaggttcaggtacccgcctatatccagtaacaaaagcaatgtcaaaacaaatggtaccaatatatgataaaccaatgatttattatccaatgtcagttcttatgcttgcaggtataagagacatattaattatatccacaccaagggatatagttaattttaaagagttatttaaagatggacaagaattaggattaaatatttcatatgcagttcaggaaaatcctaatggtcttgcagaggcatttattattggagaagagtttattggaaatgatagtgtagcaatggttcttggagataatattttctatggacaaagctttacagagcatttaagaaaagctgcaagattagaaaagggtgcatatgtatttggttattatgttcaaaatccaaaggcttttggagtagttgagtttgatgaggaaggtagagttatttctttagaggaaaagccagaaaagccaaagtctaaatatgcggttccagggctttatttttatgataattcagtagttaaaaaggctaaagtattgaaaccttcatcaagaggcgaattagaaataacagatttaaacaaagcttatatggaagaaggtacattaaaggttcaattattaggccgtggaatggcatggcttgatacaggaactcattcatctatgcttcaagcttctaactttgttgaggcagttcaaaatactcaaggaacatacatagcttgccttgaagaaattgcttatagaaaagggtggataagttcagaagaagttattgaacttgctaaaccattaatgaaaactggatatggtaagtatttaatggatatagtagaggaaatggaacttcaaaaggttaaatctgaaattgcagcaactaaaaacatataaggagctaataagatgggaaattttaattttaataagactagtataaacggagtttacataatagaacctaaagtttttggagataacagaggttattttatggaaacttataatagggaagatttttcaagtgctggccttaatatgaattttgttcaagataatgaatctagatctagcaaaggagtacttagaggacttcattttcaaagaaaacacagccaagggaagcttgttagagtaactaaaggtgaagtttttgatgtagcagtagatttaagaacagggtcttctacttatggtaagtgggaaggtgttgttttaagtgaagaaaataaaaagcaattttatattccagaaggttttgctcatggatttttagtactttcagatgaagctgtatttaactataaatgcacagatttctatgcgccagaatacgatggtggagttatgtgggatgatccggatataaatataaagtggccaatggacggaatagaaaacataattctatctgaaaaagataagaatcatctaaatcttaaagatttagatttaagtgattatgaagattttagattgtagaatttcaaggagtatagatttatgaaaatattaataactggatcaaaaggtcaattaggtaatgagcttttagatataataaaaagtggaaaagctgaaataggtgaagtttcagaagctataaaaaaatctgaagttatagcattggatgtggatgaattagatataactaatttagaacaagttaaaaataaaataaatgatttaaaaccagatgtaataattaactgtgcagcggcaacaaatgttgatggatgtgaaagtaatgaagattttgcatttaaagttaattcaattggccctagaaatttagctatagcatctgaggaagttggagctaagttagttcaggtatcaactgattatgtatttagtggagtaggaaataaaccattaactgaatatgatttaacagctccatatagtgtatacggaaagactaagcttttaggtgaaaactatgtgagagaactttcttcaaagtattttatagtaagaacagcttggctttatggttatgtaggtcataactttgtttatactatgagaagacttgggaaagaaaaagaatgtataactgttgtaaatgatcaaagaggtaatcctactcatgccaatgatttagcttaccatatattaaaattaatacaaacagaagagtatggagtatatcattgtacaggtaagggagaatgcacatggtatgactttgctaaaatgataattgaattatctggtgaaaaatgtgaagttaaaccttgtacctcagaagagtataaaactccagcgaaaagaccagaatattcatctcttgataatatgatgctaaggtgtacagttggagatgatatgagagattggaaagatgctataaaatcatttattaacaagttagataagtaaaggagttatagtgatgaaaacatatttagttacaggtggagctggatttataggctcaaactttgttttatacatgttaaataaatataaagatattaagataataaatttagataaattaacttatgcaggaaatttagaaaatcttaaatctatagaaaatgataatagatatacatttgttcaaggagatatttgtgataaagaattagtctcaagtctttttgagaaatatgatataaattatgttgttcactttgcagcagaatcacatgttgacagaagtataaaggaaccagaaatatttgtgaagactaatgtacttggaacagttaatatgcttaattgtgctaaagaagcttgggaaaatgcagatggatttaaagaaggagttaaatttcttcatgtatcaactgatgaagtttatggctctttaggagatgaaggattcttcatggaaacaacaccaatagatcctcatagtccatattcatcaagtaaagcaagttctgatttaatggttaaagcttattatgatacgtataagatgcctataaatataacaagatgttcaaataattatggaccattccaatttcctgaaaaattaattccactattaataaataactgtttacagcataaagatttacctgtatatggcgatggtatgaatataagagattggctttttgtagaagatcatgcgaaagcaattgatatggttattaatggtggtagacttggggaagtttataatgttggtggtcacaatgaaagaactaatatacaaatagttaaaacagttatatcgtatataaatgaaaatgtagataaagatgtaacagaaaacttaattaagtatgttgaagatagaaaaggccacgatagaagatacggaatagctccagataaaataaaagaagagctaggatggtatcctgaaactacttttgaagtaggaattaaaaaaactatcaaatggtatttagataattcagaatggatgaagaatgtaacatcaggtgattatcaaaaatattatgaaaagatgtacacatcttaaaaaagcagctatgctgcaattaagaactttaatagcctcttaaaaaagcagctatgctgcaattaagaactttaatagcctcttaaaaaagcagctatgttgcaattaagaagttagaaaatctgttgcaggctagcaactagagcctcggaggtcccaaaattgcaagtaaaagtattgcactaaatgaattgtttagtgcaatttttattgtttaagaaaaatagtttatgggatataatataaataaatgaatgaatgaggtgaacaacatgccagttattacaagattttatgggatagtagtaaagatgtatccaaatgatcatacaccaccacattttcatgcaatatatggagaatatgttggtgttatagatataaatacattagaaatgatagaaggtgatttatcaaatagagctttaaaattagtaaaagaatgggctgagagatatcaaaaagatttgatagatatgtggaatactaaattatttaggaagttagagggcttagaataataattatgaataatcctaaaataaagaaaataaagatagattctcagcaatatattttaatagttttatttgataatggaatacttaaagagattgattttaaagaaaaactacaaaatgatttctacagtgatttaaaaaataagatgttatttgaacaagcacaagttgatattggtggttatggtgtaagctggaatgaggatattgatattagtgaatatgaactttggaatattgggaaagttattagtaatgagtccattttattctagttagcaacctcagcccttcggacaagtcgctcgcaagctcccgactagcacccctggggggaacaaaaattagcaagtgagtcacaagttcctcaccagcactcctgaggtccaaaagtttataagtacaagtgttgcactaagtgaaagtttagtgcaattttttgttttaaggaaattggttatagggtgtaatataattactttatagacaaattgaaaggatgttaaagataatgttatttgagcgaaatgttacattttccgatgttgtacctcaattagaaataaataaataaattttattatgatggaaataagagaacatcaagattagtatgtaactatatattgctttctaatggtcaaggagtattaaatgttaaagctaaagatagattagaatttaatactttgatgttagaattttataacactagaaaagcagataatattgtggagtttttctataaaaaatgtttggaaagatatatatagcaacttcactctcaagctacctattagtacttttaaatcacatgtatttaatttatatcatgtatggttaataaaaaatcatgtctgctttttgtttcattacaatgtgatttaggctataataaaaatatattagtatataatttattaaataaggggctgatataaatgcatatagaagaaaatagaatgtttactttagaagaatatgagaagttacaacataaatataaatataatatagagttcataaatggagatgttgttcttcattctaaaacctctgttaaacataatgagatagtaaataatattcaatttaagcttatgagctacttaactaatagtaaatgtaaagtatatactgagcaaatagaaataaaatttcataatgataaggatataataaatatatttccagatgtatttgtaatgtgtgaagatggaaaaaaagttggagaaagcttcgtatctccaccaaagataatattcgaagtggtttctcctaattattcaggacatgattatataaccaaacttcaaatatatcaaaggtatggagttttagaatatgtaatagttgagcagacaggtgagatgattcagtataatctggtagatggcgtatttaagccttctataaatgagtattactccagtaatatttttgaaggattatttattaaaacagaagaaatattagaatagttagttgagtcatgtttcactcaaaaaagagttagaaccttatgaaaaattaccaattacaagtattgcactaaatgattatttagtgcattttttgtttgagaaaagtagtttatgggatataatataagtaaacaagagaaggaaattaaatttaatgaaacaataggtgaaaaatgaaaataaaaaaggaaatgcatcatatacatgataaaagctataaagatttgttttctaataagaaactactagttactatgattcaaagttttgttgaaagtccatggggaaaagacattacagaggataatatggaattagtaaataagtcatatattctttcggattatgaggaattagaatcagatatagtatataaagcaaatatagaagataaagaagtaatattttatatattactagaatttcagtcatatgttgattatagtatgcctataagactatttatgtatatgtcagaaatatggagagaagtattaaagaatactaaaaagattgatgttagaagtaaagaatttaagcttccagcaatagtaccaattgtattatataatggagagtataaatggactgtagagagaaaaaattaaaaatgttataaataaaaacgaattatttggaaataacataattgattttgaatatatacttatagacataaataagtatgagaaagatgaattgatgaaattaaaaaatatagcatcagcagtatttttgttagatcaaaaagtagatgttgaagaatttataagcaggataaaagagattgcaataaactttaataacttgacagcagaacaaaaaatgatgataaggcattggttaagaacgaccttgaatgacgatataaaaaataaattgggtgaaagaatagaggatattttaatagcaaaaaaagaggaggttgaaataatgacttctaatatttcaagaacaataaaggaaacttttgaacaaactagagaagaagcgagattagaaggaagagaagaaggaagagaagaaggaagagaggaaggaaaaatagaagtggcaatagagatgttaaaggatggagagccaatagaaaaaataattaagtattcaaagcttagtgaaaatgagatattagagctaaagaaaaatatggtataattaaataagtgaatttaatcttgaaattaatataggattagcttagtgttaccttaaacagagcatatgagcttgagaaggataaaattccagaagaattagcagtagatgaagctgtaaagaaggctgtagaaagattggacgttatgtatttggataaagatgaaagagaaatatacgaaaatgatttaaaaagacttagagattgcatagcggaaataaaaacaactgaaataagaggaataaaaaaaggagaaaataaaaaggcttttgagatagctaaaaatttattggatgttttagataatgaaactatagctgttaaaacaggattaaatataaatgaaatagaaaaggtaagattatcaaataagtgataactctaggctagcagttttgaaattcaagaattctcagtaagaaatttaatgaaaaaggaattttcatacatttaaataggaaaaggtccattactatggagtaatgagcctttttgttttatactacataaatttggaaatcatgaaactaccaaataatatgtaggattaaatttcctaggaaatgattattaaaaagcttgaccagtattttatcacaaatgtattagatccttgtataaatttttcggatataattgttgtattagcaagctctaaactggcacaatacaggaaatagaaattgccaagtataagcgttgcactaagtgatagtttagagttttaatagagtggtttttattaccactctattttacttatacttaatattaaataattgtaaactacgtataatagcttagcataaatattttcgcgatatgcataataatattatggaaattttctattgttggaggaagtaaagatgtttaagaaaatattatctattataatgtttctaacaataatgtcgtatatgttattgagctttaatgaaaaagcaacatttgcgaatattaatgctgctgaaaaaagacctattagagtagctgtatttttaataaattttagcgatgattatatttctttagtgcgtaaagatttagaagatattcaagaagaaaatccaggaaaagtggaatttacgttttatgatggcaaatcaaatcaagcggtgcaaaatgagcagcttgataatgtacttaaagaaggtgttgatcttataataatgcatttagttaaaaataggaatgaagcaacggtaaaaagagttactaatcaaattgctaaagctaatattccagtgatattttttaatagggagccgcttttaagtgagattaaaagatataataaatctctatatatagggttagatgcaaaaagcgatggaactatggagggcgagattcttgctaatgaatggaatgctaatagagactctattgataagaaccatgatgggataatgcaatatgttcttttggaaggtgaaagaaataatttagtagcagctgatagaacaaaatattctcttctagcacttagtgaagcaggagtaaaaacacaggaacttgaaagagtatttgcttattggagtaaagaattagcaaaagaggctatagagtcaatatttttaaaaactggacctaagattgaagctataattgcaaatgacgactctatggcattaggtgcaattgaagctttacaatcatatggatataatttaggagataaagaaaaaaatattgcagtagttggtgttgaaggattaccagaatctcagaagttaattagcgagggattaatgttaggaactatttttcaagacccaaaagcaatggcagaagcactttatactatagggatgaatatggttcaaggtagagatgctattgaaggtacaaattatcaatttgatcaaacaggagttgcaattcgaatacctaatcaaattatatataagaaataatttgattaggtattaaaatagaagaagattaagttaattgttttgagttttaaggtattcataatagtaacgaatagcttcgtcaacgatggtgtttaaataaacattatcatcaatatgaatggctttgattttacttaagattcttacagtagagcgccttaaagtatagcttcttaccatatcaaaagcttccccgtcaacagatggggttcttccatttggattaacttttaaagttctgtggtccaaaatttcctttttgtcattaggattacatggaatatcatgagaatttaaattaggtgtagcattagcactataattgttactgtaattattattattattattattattattgctattgctattattgttgttgttgttggtgttatcgtgaattgtgggtggtgcaggatattcaataagttcttcatcagaatcaaaagaaaatgattttaaaagagtcccatctaatttaatttctccctctgagaaggtaaatatatcaccagattcattttcttcaatggaaaaatcatccttgatttcgcccttgaccttagatttttttacagacatgttcatttataattcctccctatgtattaaaatgcgaagaaataatagattatataagccttatcatattcagaattatttaccccttcatataagatatatgcaaatattaaaatatataaatactttaatatgaaaaaatttaaatttttttatatattcataggtttctaggttcgtattttaaaataaaaataggtttaaatgtttctagaaaaatagatttataggaatatgtttttctaggtaagtatgtttatagaaaaatatttacctaggaaaatatttaaatatgtaaatatttataggaaacatgagggtttgaggtagatgagtgaaaacttacatagaatatactatggtagaatttaatattggcaggaataaaagattgcttagtacatttcttgttttaagtaaataattaatagggtataatattatgtatgttaggtgtgacaagccaaaggagcgatgagtttgaatttagaacagcaaattattgatgagatattagaaatatgccataagcataaaagtattaataaagttattctctttggatctagagcacgaggagataatttgccgaaaagtgatattgatctggctttgtattgtgaaaattcaatatctgaatttattgaagacatagaaatgaatacaagtactttattggaatttgacttttcagatatgaaagatattaatgatgaatttttcattgaacaagttgaaaaagaggggataattatttatgagaagcattgattttaaatatatgaatctaaagaaagcttatgatagacttgttgaagtaagcagattatatgatggaaagaacgacataataagggatagcttgattcaaagatttgaatttacatatgaatttactcataagacacttagagaatttatgaaatatttgggggtaactcttgaaaattcatttccacgtacaatttataaaaaagcatatgtaaataatctaatatcagatgataaagtttggattagtttattagaagatagaaattctacatcacatatatataatgaaagtttggcaaatgaaattgctagtagaatagtaaaggaatatgttaatgcaataggtgaattggttgaaaatttagaaaagcttttataaagaatttatggagttgtggatgtgtatacttagccaaggtttatgaaggatgcaatcagaaacagttaaaagtaaaagataaaaatttgattaataatgcatataaagcatcattaaaatcaaaacgaagtggaaagaatcaagtaaccatatggaagccagaattaaatatggattaaaaataatgcaaaattaatatatagtttcatactgaaatttagatcaggatattacataaataaaaatattttcaatatacatatgaaatatcaatgcgttgtactgacgggtataccacttaccgtcgatacaacgcatttttgtgcaactttatagccttagaatcacccatcagaattacacagaaactagaacaaaagtatgttattcattttggcgagttatatacataagttcaggtcttagttgggttatctatagatttcacaaacaagaacttgacatatacattaagctaaatcaagtaaattgaagaactaatctaatgtataagtaaaattcttgaattgcttatctattatatatagataaacaacttaagaatttgatttacactttgcaataaataccatattagaaagtagaaacatttttatgcagcaggcattgaaaatgagctgttaaaggctcttaattataggttgttcaactaatgcttgtcacaatgaaattgggagcaagcattagtggtgcaacctgcaatttagtactttcagcgaaattttcatagtcctgtgaaataacaatgtttttactttcggtaggttattgcataagtctaagttatatattgtttatctatacaaaagtattaaaaaattcttatatttgttagtttacatatggaacaaatgttataaagtgctataataaaaaatgtttggatattaaatattttttgccatatataagttttaaatagcataattcatccgttataaaactatatacattgaaaaaatgattcttcatcataattctaaaaacattgcaagaattatagccatgattgtaaattgtgcattatgaattgaattgtgcattgcagtatatattttaagataaattttcatgaattaaacttttgaaacatgtatattaatctctttataaggatgtggaacaatgtcgtttttgcaatttaatttttgtatttttttattaatattgattttggcatattatcttttacctaagaagtttcaatggatatgtttacttattggaagttatattttttatgtatctgctggtataaagactgttggatatatagtttttacgactttgacggtctggattggaacaattgtcataagtaaagttagtgaaaatatgaaaattgaattaactgaaaagaaagaaacactgacacctgaaagtaaaaaagaaataaaggctattgcaaagaggaagcagagaataattttctggtgtgttttattaagtaatttcggaattctagcgtttttaaaatactttgattttttatcaaaaaacattacaggattatttaacatagtaactcatcatggagcagttccaatgaagttggatttgttactaccattaggaatatctttctatacttttcagtctatgggatacctaattgatgtatataatggaaaatataaagcagaaaagaacttatttaaatttgcactgtttatttcattttttcctcaaattgtacaaggccctattaatagatttgataaattatcagaacagctatacaagacccgaagatttgattggcagaaatttaaatatgggctgcaattgatcttatggggactttttaagaagatggtaattgcagatagagcaatcacattagttaacgaaacatttaagaactatgataattatgggggtgcaattacagttgtaggagttttattctattcattgcagcaatatgcagatttttcaggtggaattgatgtggctatgggaatctctgaattgctcggaataaatatggctgtgaattttagaagaccttatttttcaacctcactatcagaattttggcgtaggtggcatattaccttaggtgcttggatgcgcgattatatattttatcctctagctctttcaaagaaaatgtctaaggtatcaaaactagcaaataaacatcttggaaggaaagcaggaagaatcattccagttgcattttctaacttagttgtatttttagttgttggcatttggcatggagcttattggcattatatagcgtggggattatataacggtattgtgattgcctttagcacgattgcagaaccgttttatgaatggttaaaaagggtgactaaagtaaatactgaatgcttctcatatcacttatttaggatattaagaacgttttttattgtaaatttagggtggtattttgatagggcaagtaatctgaattcttcactttacatgttacataataccgtagcaaattttaaagttactcaattacttgatggtacaatttataaacttggacttaaagagcaggattttagaattttattttgggcaactattattttatttgcagtaagtgtattacaagaaagaggagtaaagatacgtgaatttttatctaagcaaaatttagtttttaggtgggcagtattttatgcattaatttttgctgtcataagctttgatgctagttctggaaatctcctaggaggatttatgtatgcgcaattttaaatataaatggtttagtggaataatatttataatggttttcattattttaagttatggtttagcatttgccctagtaccaaaaggtaattattcacgaatgaccatgcgtgaaatgtattccgataaaaaagattttgatgtggtatttgcaggcgcttccctgtctaatagggatatcaacccatatattatggataaggaattaggagtaaatacttttaattatgcattttctcagcagatgtttgtagggacttactattcactgaaagaaatgtttaattatcataagcctaaactaattgttttaactgttgatccagataattttaccagcaaggaagaaaagccaatagtatttcttgcagtttccttatatatgaaatcatttttaaataagcttgaatattattttgcatcgtctcaagatggttcttatttagacaggctatttccgtggcgtggatatgatgtaaaatcacctcttgatgtagtaaacaatatttatggaaagtttgattctttttatacagattatccaaagccaggacaagtagaagccatggaaaacaataaaaatggttatgtaggaaaaggatttgtaaaggtcgatcctagtgatgaaaaaggaactctaaattacgataatttaaaactgcctccggctaataaaaatataagcgatataaatacaaaagatacgaaatatttaaaaaagatatcacaattatgtaaggagaacaattgtgagctaatccttctaagtacaccatttcctacatttcaaattctcagagtgaaaaattactttgaatttgataagaaggtggcagatatagcaaaggatttaaatattgaatattacaactataacttaattaaaccagaagtgtttaagttaaaaaataattatttttctgatactgaacacttgaatactaatggcgcagaggctttctctaaatcactggcatctttcctaaaaatgcgcgaaaatggtgatgatatgagcaaatatttttacaaacaagatgagtattatgcatcaatagattatgtttcatctgcgtggtttaattggaaaaagaatggtagtattataacactatcaggggattctcttcatggatctaaagttacaccagaataccaatttgtattactagattcagaaactggacaggagcatatcatacgagattatgataaaaatccagattttgtttttgattccgagtcttataagaagtttaaaatacgagtaaatgctagagcaaaaggatctagtaataatgaagttattcgtcattatgatgaagatgtctccaaagaagagttatataaaagataatgtaaagtaagctatgaaaaaatagattatggaggaaatattatgggaaaaagtattttatcttatcttgaaagctcagaaaggaaatttcctaataaagttgctttttctgatggtaaatatgaattaacttatcatgaattggttgaagcagctaaaagtattgggagctttttgatagaaaatataggtatgcgtaaagctgttgttgtttatatggaaaaaggctcaagaaatatttcagcatttatgggtgcggcatatgcaggttgtttttatgttccactggatgctcaaatgcctgtggagcgtattaatataatattagatacactgaagccagcagctataatttatgatgacaaaacagaaaaatatctttcgcttatagaaacggattgcataaaggtattgtatgatgaaattcatatgttaccagaaaatgaagaaaaattagagaatgcaagaagacaaatgatcgatactgatcctttgtacatcctctttacaagcggatcaacagggattccaaaaggtgttattgtatgtcatagatctgtaattgattatgcagactgggtagttaaaacttttgagttgaatgaaaatactacttttggaaatcagacaccattttattttagtatgtctgtattagatatattttcaactattcgaagtggagcaacattatatattattcctaaaatgttattttcatttccagtaaaattacttgaattcttaaaagaaaaagaaattaacacaatttattgggttccatctgcattaagcatagtagctaacctaggagccttagatgtcattaagctgcctcatttaaagaacgttttatttgcaggagagacaatgcctactaaacagcttaatatatggcgtagacatgttccggatgcggtatatgcaaatttgtttggaccaactgaaattacagatatagggatatattatatagttgatagagagtttaatgatgatgaacctatcccaataggggtgccatgtgataatgtagatgctttggttgtggatgaagatggacaacttgttgaggaatgtggaaaagttggagaattgttaattcgtggatctttcttggcttgtggatattataataacccagaaaaaacaagagaagcatttattcaaaacccattaaataagagctatcctgaaactgtttattgcacaggagatttagtttactggaatgagaatagagaattagtatatgtttcacgtaaagactttcaaataaaacatatgggaaatagaatagaattaggtgaaatagaaaatgcaatgagtgcattagaagacgtggacatgtgttgctgcctatataataaggaaagtgatcaaattgttgctgtatattcaggaaacttggagactaaaaaactatctcagaatttgaagaaaaagctgccacgctatatgttgcctaatgtctgctataacagaagcactatgccactcaatatgaatggaaaaattgatcgtaaaaagctaatagaagaatatgtaaaataaaggagagagctattatggaaaagttaattgaattattacaaggtgttagagatgatgttgattttgggacatgtacaactttagttgatgaagggattttggattcatttgatattgttgaaattgttaatgtaattgatgaagaatatgatattgaagttcctgcaattgaaatagttcctgaaaattttaacagcgcagaagcaatttttaacttgatacaacgtcttttagaggaatagattttattataagttagatggcgagattgaaaattataattatataaagttactgcactaaattatgtttagtgcaacttttgttttaagcaagtgatttatggggtataatataagataactattaacaatattgaaatgaaatttacaaacggtctaattaaaaagaggtggtcacttgaaaaaaattgttatacttttatgtttgttctggatgggatttatattttatatgtcaggaaataacggaacaatttctcatgaacaaagtactaaggtggttaacataattgaaaatgctcaaggaaataaggaaaagtcacaatctgaaaataaagataaagcagtaaataacagcaacagctcacagcaaaataagaacaacattaatgttcagcaggcagaagcaagtaacttagatcatatagtaagaaaaaatgctcatgcatttatgtatatggtactagcaattctagtttgtggtgcacttttttcctataataaaagtggaaaaggtatgataatttacatattgtttatttgtttattttacgctgtaacggatgagttacatcaatcttttataccaggaaggacttcattagttagtgacattttggttgattttatgggagcgttgattggattaggattattttatttttcttattataagatttataaaagaaatagattataaagaaaaaaagtacgtagttaaaaaattacgtgcttttttctttatgtatagataaacaaatttaaaactgcatttatgtatgacttaccgaaattataaatatttgattccgaaaagctatgaaactatcacaaaatatatatttgtttttgtagtttattaggtcaaggttgattttaaatcctctttacttcgctagctgttaaaataattttacaatagaataaaatttcatgatatactataaataggatataattgacaaaaaaagataagatgactaatatgggggacataatcatgagtaaaaaaataaaaaaagcgataattcctgcggcaggattgggtacaaggtttcttccggcaactaaagcaaaatctaaggaaatgcttcctatagtagataaacctgcaattcagtatattgtggaggaagcaatagcttctggaattgaagaaattcttattataactggaaggcataaaacatgcattgaaaatcattttgataagtcagtggaacttgaagcagaattagctaaaaataataaggatgagttactaaagatagtcagggatatatcaggtatggcaaatattcactacataagacagaaggaaccaagaggattaggacatgctatttactgtgcgagggcatttgtaggaaatgaaccttttgcagtattgcttggagatgatattgtttatacaaatgaatatcaaaagccttgtttaaagcagcttatggactgctatagtgaatacaaaacaagtatattgggagtgcaagcagtagaaccggagcatgtatcaaggtatggaatagttaatggaataaaaattgaggatagagtttcaaaggttaaggggttagtggaaaaaccaaatattaaagatgctttatctaatactgcaattcttggaaggtacataataacaccacaaatatttgatgtgttaagcagaattaaacctggaaaaggtaatgaaatacagcttacagatgcattattagaattgcttaaagaggaagcaatttattcatataactttgaaggaataagatatgacgtgggagataagcttggatacctaaaagctacagtagaatacgcactaagaaattcagaacttagagatggatttactgattatttaaagaatatagttatttaagttttgaaatttaagttgaattaattaaagaggaaaataatgagtatattaagtttaaaaaatattagcaaatattataaagtaaaaagtagtgaaaaagtttatgttttaaaagatattaatttatcttttgagaaaaatgaattagtggcgattataggagaatcaggtagtggtaagtctacgctaatgaatttaataggtggattggattctaaatataatggagaattatttgtaaacggagagaatattaaaaagtttaagaaaagagagcttgatgagtataggaaaaataagattggatttgtctttcaaagttttaatttaataccacatttatctattttaaataatgtagcaatagctatgaccctatctaatgtaaagaaaaaagagagagttaagcgtgcaaaagaattgttaatagaactggggttaaaagatcatataaataagaagcctaatcagttatcaggcgggcagaaacagagggtagctattgcaagagcattagtgaatgatcctgaaataattattgcagacgaacctacaggaagcctggattcaaagacatcaatgcaggttttagaaataatgaagagtatagctaaagctggtaaacttgtgattatggttactcattctgaaaaagtagcatcttgctgcagcagagtaattaaaatagctgatggaagtataaatgaggataataaatcctttgaattggaagctgctgttggcgatgagaagaactatgaaggaagcagatacatcagaaaaagaggaaaaagtttaaattcttttaatgcaataaagctggcacttactaatatgaaggaaaaggcaataagaaatatatttatttctataggttcaagtataggaataatgagtcttatcttgatgctggcttttgggaatggaattaaggcttattttaatagaactatgaatagttatgttaatcctctagtaatagaggtgaatatgcctagtgatgattctgaaacagttgacttagatattgctactatacagaagccagacattaataaacaaactccatttaaagaagaagatataaaaaagctatcagaaataaaaaatgtatcttctatagaaaagggatttaatgaaatatctttaggagcagattccttaagctataatggaaaaggaagtaatgttatgaggctttcaaccatatcctcaaatataacagaatcaaatcttaaagaaggaacattacctaaggatggagagatactgataaataaaactataagtgataaagttggagaagacgttattggtaaaaaggtgactttgagcattttagtaaatcaaaaggtattaaaaaaagaatttgttgtaagcggaatttatactacagctggtggagatttaacttcaattatgaagtctgtctttttaaactattcagatttagaaaattggtattcagagaataaatatgaattaaagcctaatgtaatgtatttaaatacgcctagtgaaaaatatactgataaaataaaagaaaaggttaaggaacttggatattcaggatcttcacaagagcaaatgttaaatttatttaattctatgataagtattttaacttatgtattatcaggaatttcagcggtatctttggtagtatctgcgatcatgattgtagtaataatgtatatcagtgttgtagaacgtactaaggaaataggaataattaaagccatagggggacgtcggaaggatataagaaagatttttgttttagaagcgttcttgattggctgctttagcggggttattggacttgcctttgcatatgcattaatgagaggtataaatatcaagtcaattaaattatttggcatcaatttagttttgataaagaagtcatatgctgcttttggattaacattaagcatcgttataagcgttctggctggattattgccagctaataaggctgctagattagacccagtagaatctttaagaagagaatagataatatgtaatacatattgtccaaataattcttcatgataattctaaaaatattggaaaaaatttagctgtaattgtgaattatgaattttgaatcgtgaattgtaaattgaaatatgtatataaaataaacctttggatacctaacatccaaaggtttatttattatgttaaatgcttgtacataaatgaatatctatttttgaatttaaatttccatataagaatattaagtattattttaattcaaaaagagcattctttgctgggtatgaaacatatttagtaccattttctgtaactaatatattaacggaatatgcatggtaagatatgttaacaactttaagattagtaccatcagcatctacattatattttgatttaaaagctgaaactgtcatagtgctttccttaactgaagggttaggaacagccattggaccaatacctggaactgtagcactgacactatctttagaaatagtgaactgttgaccaatggctttttcagcactatcatcacttaatgaaccttttgatataacattgttaacagtccaagtaccatataaatatgaaggtatagatgcttttgatgtgctaccgcttgaaccagagccaccgccggaaccaccagaaccgcctgatgaacttgtatttgaattatttgtatcagtagtagtagttgttgttgaggccgaattcactgtagaagatgtgctgattttctctccacttgtagcgaatgtgtagtttacaccattaactgttacatttccagttttcattgctccagattcacttaagtaataagttttaccgtttaattcaagtaatccggtttgcatagaaccagaggcatttaagtaataccatgaaccattatcaagtacccagccagtttgcatgcttcctgatgaattagcataataccaagtgcctttatcaataatccaaccagttttcatatctccagatggagcaaggtaataccaagttccgccatcactaacccaaccagttttcataactccattagaatcgaagaaataccattttccatcaattgctttccagccagaggcccaattacttccgtcattataactccaattaccactgtcagcttgtttccaagcggctgatgcctttgttggcatcgcaacagtagcagtagctaaaagtgtaagtgcagctactaacattaagtttcttaatttaagttttttcattttaacactccttataatacttagttagttatcatcaaagttcactatagcttgtggaattttttggcttactcgttgtatgtatagctatgtgaagtttgaaatatacatatataatttaccatttaaatatgaaaatttcaaattattataattagtggcagagtgaattgatatattaagaaaaataaacattgaaataaatggagatttttaatttaaaaaccattcatatacatcgataatgtggaaaatatattgtaattaatccataaatgctatattatagaatgtatagcgatataatataaattatatgtttaagatttaaagtattgaaaggggataaaataggaatgaagatgaaaaaaatattatcaatgggagctcttggattagtagtagcttgctctacatcaattggggctttagcagctgaacaaaaagtacctagcaaggcaggtgtattaataggggcgcttataaaccaatatgatagcggaaaaaatcaaactggtttattaacaggagttaataaagatacaaagattggttcaattgtatcttctgattttgttaatagagtagattctacttttggtaattacaagacagttgataaagcaataacaaaatttgataataatcaaaatgagactgtagcacaaatattacaaaaagctactaaagatgaggctacttttaataagtttagaaatgattttgtaagcatagcaaaaaaggtacaagctatgaaagatctaccagatgacaagagagcagttgcagaagttaatgtaattaacatagtaaaggcttatgatagtacattaacagttggatttggtaaagatagtaagggaaatacaactggaactataaagaaatcaggaaagactataatagaacttaataatgatgatgttcaaagcataatagatgcagttaatggtattacttgggattatgtttctaaattaaaaggtgatcactaaaaaaggttaatcttaggaaggaattaatatactagcatgaacaaaacaaaaagaagcatcagtattattatacaaatactattagtattcagcattatagttgcagttttatcaatatttcttagagttattgtgttaaataaaactacttatacaactatatttgacaaaaataatacttatggacaagtcaaagaatcaatttacgacaaaatagatgctacattaagtgctaaaaatattaattatgacattaaggaatcaataataacagaagatgatataagaaaagaagctgatactatgatttctggcttaattgattatttagaaacaggagaaaataacattaaacctttgaatacagaaatatataaacagagagttgctgatgtcttacaatcaatttttggtggcttaaagtctagcaaaaatgatttgtcttataataataactataatttagagaatatggcatatgaaaggccaaagtttaaatttagtaatatgatggttttaagagaaaattcacaagatgttggaaaaagtgctttaaagttggaaaagttaatgtccaaagaagaagcagaagctagagtaagagaaatattgaaagaaaaaggtttaactgaggaacaggctattgaaaaggcaaagaaaaagggaataactgaagatcaggctttgagaatactagcgggctatggcataacaatcgatgatgattctaaggaaagcgaatcatcgtcagagagtgttaataatagagatgataatagtgcgtctgtatcaagtgactataattctcctgaaaattcaggaaagggatcagaatcagctaataataaagtgtcagattctgcaagcaatacacagtctagtaaaagtattgaaaatcagttgaatagtatagaaagaaaattacagaatgaggcagaaaataatattgacaaagaagttgaaaaaataaatttagataagatatttgcttctaataaacttcatatattagcaaaggcaacgtcgatgatttgtaagttgtcctggatattgataactctacctattatttttatggttatattgctgaagataaatggaagagagagtgattcaggttttggatacataagaaatggagtcttattatcaggattaatattattaggaacatcctctgttgcgtatggattaagagtttatgaaaaaattaatattaaccaagcttatttaattaatacaatttcttatacaataaaatattttttggaaattttaatgatgtatgggactataatatttgttttaggattacttatgtttttacctaaacttataaagcgttctaatatataacaagtgttatttatagggctatgctagtggtttatagttttatcataataatgagaagagaattatcaaggagggtaatataataatgaaaagtttaaaattaagaaaattagttgcatgtgctgttgcagcattaacaatagcaactttatctccaattggggcatcggcagaatggaaacaggattctaacggatggtggaatactgaaggaagttcatattctacaggttggagagctataaacggaagttggtattattttaatacagatggatatatgaaaacaggatgggtaaatgatggaggtacatggtactatttacaatcatcaggagaaatgagaacaggttggataaatgatggaggtacatggtactatttacaatcatcaggagcaatgaaaacaggatgggtaaatgatggaggtacatggtactatttacaatcatcaggagcaatgaaaacaggatggataaatgataatggtgtatggtattttgcatcaacatcaggagcaatgcaaactggagtaattcaaattgatggaaagatatattattttgcatcaaatggagcaatgcaagttggtaatgcaacaattggtggagtagtttatacttttgcagcaactggagaagctataggtactaaaataccaactccaacattaggatttacatctgggggagttgcagttgacttaaataagtcgacagacacagatacagacacagacgatgaaacagaaagcagtaatcatcattcatcaggtgggggatcaggtagtaaagtatctcaagatccacaacaagatgctatagataagacatttaaggctcaaacaaaagttgagttaactcaatctgcaccagatgcaagtggggcagtaactataaaaccttcagtagttggatttacaccaggagaagaagcaacacctattactataggaggggtaacttattctgctacaaaagagataaatgtatcattagacaatggaacagatgttggagttagcggaacttatgctagcggatataagattgcaaaaggtcaaagtggaacagtaactgtagttatttctctaatagattctaatggaaacttaaaatatgttaattcaacaccaacacatttctacaattagtagattcttatattaatatatgcagagttaaggtatacttgtttttatgaatttaatactttaatagagtttaagaaagcagtaagaattttaaattcttactgctttcttatttttttatatctgctataatattacttgtcgctatttttatttctagcgaagaaaaatattggggaaagtgttattttatataaaataaagtttgttatatatattgtaaaaataaatcttcatcataattctaaaaatattgtaagaattctagacgtaattgtgcattgagaattgtgaaatgtgcattgtgaattgtgaattgtgaaacatatataagttaagacgcattaaagaaaaagataagtccaaaactaccaagaagattttgggttaggcataagtaatacagcagtaagagcagccttgctatggatatatctgctgctaaatagaatgtaaaattagtatttcagatttttatcgcagagattaaaaagtcagatctataaaaagtatacgactcagtagtcgcctgagatttaactctgatagaaaatgattaaagtgagaattgttattatttttgattacgccttaaaacgataattgcagaaaggagtggaaaaggtgagaccattagcagacttaatgagacctaataaattagaagattttgtaggacagcagcatatattagggcaaggaaagccattatataacttgatatctggaaaaaatatatgtaattgcatattttacggaccaccaggaacgggaaaaacaactttagctaatataatggctaattatgtagataagaaattttataaattaaatgcaacagttgcatcggttaaggatattcaggacataactaataatatagatagcttattaaattataatggagttgttttatatattgatgagcttcagcattttaacaaaaagcagcagcaggcattgttagagtttatagaagatggaagaataactttgattgcaagtacaactgaaaatccatactttgttatacacaaagcaataataagcagatgtaatatattctcttttaaacctttaactacaggtgacataatagttggactcaagagatctatacaaaagcttgtagatgaagggatagaaatagaatattcagatgaggcgctagagtatattggagaaatctctcaaggtgattatagaaaggcttataatattttggagctggctgtaaactctcaggttaagcaggttagagttatttcaagcgaatatattgaaagtctaggacaatcaagtatgcgggctgattctagtggagatgaattttataatttattaagtgctcttcaaaaaagtataaggggcagtgatcctaatgcagcagtacattatctagctagattgattaaaggaggaaatttaactgctataattagaagaatatctgttattgcagcagaagatattggtcttgcatttccaaatgcattatctgttgttaattctggaatagaactttcgttaaaggttggacttccggaggcaagaataattctttcagaaatagttgtatatttagcaacgcttcctaaatctaatagtgcatacttagctatagattctgctatgagtgatctagaaaacatgaactttggagatgttccaatgcatttaaaggatgctcattactctggagcagcaaaccttggtgtgggtggctataaatatcctcatgattatcctaatcattatgtaaaacagagttatttaccgcaagaactgcttggaaagatttattataatgaacaaaataataaatatgaagagagtttgaggaaatactgggcagaaataaaaaaataataccaattatcgtttgacaaaagccgagtattttggtaagatataaacgaatttaatatatcttttataatactagaaaaacaaagaaatatcaacaaaaaacgaaaaggggtgaagaaataatgaaactttcaactaaaggaagatatggagttagagctatggttgacttagcatctaattatggtggtgccccagtttcaataaaaactatatcaaagagagaaaatctttcggaatactatttagaacagttatttagcccgcttagacgtgctaatatgattagaagtataagaggtgctcaaggtggatatgttctatgtaaagcgccaaaagacataacggttggcgatattatgactattcttgaagggccagttgagatagcagactgtattgatggtgttgagtgcgatagctcggattgctgtgcaaccaaagcagtttgggagaagattaaaagaagcatagacgatgttatgaactcaatcacattacaagatatacttgatgattatgagacaattaaaaacaataagaataatattaagatagtggataggagtgaatgattatgaagaacgtatatatggattattcagctacaacttatgtaaagccagaagtattagaagaaatgcttccttattttactgaaaagtttggtaacccatcttcattttatggaatatcaagagaaacaaaaagagctatagataaggcaagagaacagatagcagaagcgttaaactgtttgcctgatgaagtgtatttcacaggtggcggatcagaggctgataactgggctataaaaggtattgcatcagctcataagaataaaggaaaccatataataacaactaagattgagcatcatgcagttcttcatacttgtgaatacttagaaaagaatggttttgatgttacatatttagatgttgatgaagaaggtttcataaatttagatgacttaagaaatgctataactgataagacaattttagtaagtattatgtttgctaataatgaaataggaacaattcaacctataaaagaaattggagaaatctgtagagaaaagaaagttttcttccatacagatgcagttcaggctgttggaaatgttcctgttgatgttaaagaaatgaatatagatatgttatcacttgcaggtcataagatttatggaccaaaaggtattggagttctttatataaagaagggaattaaaattgataatttaattcacggtggagctcaagaaaagaatagaagagcaggtacagaaaatattgcttctattgttggtcttggtaaagctcttgaacttgctactaataatttagaagatcatatgaaaagattaactgcgttaagagaaaaattaatagctggtttacttgaaattccatacactaaattaaatggaccaagaggagataagagacttcctggaaatgttaatgtatgttttagatttattgaaggtgaatcaattttattatcgttagattttaaaggggtttgtgcatcaagtggtagtgcttgtacttccggttctttagatccatcacatgtattacttgcaattgggcttcctcatgaaattgctcacggatcattaagacttagtatgggtgaaggttcaacagaagaagatgtagattatgttcttgaagttgtaccaccaattattgaaagattaagaaatatgtcaccattatgggatgactttttaaagaaaggggaaaattaatatgatatacagtgataaagtaatggatcatttccaaaatccaagaaacgttggagaaatagtagatgcaaatggtgtaggtgaagttggaaacgctaaatgtggagacataatgaaaatctacttaaaggttgaagataatataattaaagatgttaaatttaagacttttggatgtggatcagctattgcatcatcatcaatggctacagaattaattaaaggaaaaacattagatgaagcttgggaattaactaataaagcagttgcagaagctttagatggtcttccaccagtaaaaatgcattgttcagttcttgcagaagaagcaattcataaagctataaatgattacagagcaaaaaacggattagaagtaatacctatggaagaacatagtgacgaagatctacatgctgctgtacatggagaagagtaataggtggaatttatgaagaaaaaagttttagtaggtatgagtggtggtgtagatagttctgttgctgcatatttattaaaacagcagggatatgacgtcattggtgctacaatgcagatttggcagcacgatgaggaatttgaagaaagggaagggggctgctgctccctttctgctgttgatgatgcaagaagagtatgcgacaaacttgatataccattctatgttttaaattttagagattattttaaggaaaaagttattgataaatttgttcaagaatacatagacggaaaaactccaaacccttgtattgaatgtaataaacatttaaagttcgatgaacttttaagaagagcaagaggtataggggcagattatgttgctactggtcattatgctaaaattgaaaagcgagatgatagatatcttttaattagatctgatgatgatagaaaagatcaaacgtatgctttatataattttacccaagatcagttagaacatacattaatgccttgtggagattatgaaaagacaaaaataagagaaatagcgaaggaaattggtcttgctgttcataataaaaaagatagtgaagaaatatgttttatttctgataataatcatgggaaatatatttcagaagcagaaccagatagggttaaaccaggtaactttgtcgataagagcggtaatatactaggtcagcataaaggaattgtatattatactattggacaaagaaaaggacttgggctttcacttggaagaccagtatttgtaacaaatataaatgctaaaaccaatgaagttgtactggggtctgaagatgatatcttcaaaacagaattaattgcaactgatgtaaattttattccttttgataaacttgaaaaagaaatagaagttacagcaaaaatcagatattctgcaaaaccagcagaagcgactttgataccacttccaaatggtagagtgaaagttatctttaaggaaaagcaaagggcaataactaaaggccagtcagttgtattttatgatgatgaaatagtagttggtggcggaataatagaaagtataatctaaagagttattgtaatttaaatattttttaggctgagagtgcgtaagtgctctcggttttttgtttttgttctgttttgaggtcatacaatatttcaatatgcgagtagcatatgagtattacagctagcaaaaagctttataggttcagagcaaggcgcgcgttttatgagaggattaactatgtgatttagaattaaaaagaactttgtaagtaattatcctgatttgataattggtagaaataatacttaaaggtcaggataaataaataatggaagtgaatatgaaataacaactagaagagataaaatatttacttgttttttacataatagtattaacttatgaagatatacttgatataatatttttgagagtaaaaaattggaaggtgattttttgaatatcttcaaggcgttaaaaagatacgatgaacatggctttaattctaaaggatttcataaaaatggcacgaaatatgacgagtatggatttgataaaagaggaatgcatagaaatgggacatattataatgaggaagggtatgatagagaaggatacgacaaaaaaggctatgatagaaaaggatttaatagtgctggttttgacaaagaaggatataacaaaagtggatataacatattaggctacgacagaggtggtgaatacttagaagtaagatataagtggaagtgatttaagcaaatctaaatagtaagagaggaatgctatgaaggaaataaaaagctacatttctaaatcgctattagaatgaatattttatacttacattaattccatataatagatgatattggtagtgtttcttttgttaaagttaaagaaaacggttgtatattctcgaatagattcagccaaatttagaggatattaaaattttacctcaaaaattttggttaatgaaattaagtacttactaaaaatatagtaggtactatttttatcctctagtaacggctaatgaagacgaagcattcataaggtatgatgaaaatatttatattttcgtaggagatcgcccatagaggcaaagccttcaaaaagtatgatggaaattataattcagtgaaatctgtgcataaccttttgaacagtttagctaattagattcagtattttaaaagttaaaaaataaattatatgcacttgctaaattttctacatatgttcaaaaagacaaatgtggaaaaatctacgcattgaaaagagtgcaaagttcaacacgaaaattaactataatcttctacgattttttatgtgtaaagttattgtgcggtaaaattatacatctgagcatattaatatgaataattttcctcttgttggagactatatcaaatgaactagatttagtttgttaactatattacttattttagagaatatagggggaacactacagtatatagtgtatagatataagcaggcataaggactttctattaaaaattattttggaggtgcacaatgtttaaaactagagacttctatttcaagaaggtttataacattaaaggcaaaaggattggtattatagaagacttatacatagatttcttttggggaaaggttgtaggatttaaagtatccaatagccatctgttctctaaaaataactatatagacatggaagatgttatagatgtcggtgaagatgttataatagaaaatataaaaaaaggtgatggacttacatttaaagagattaagtatatggaagtcattgatacattggggaatgttaaaggagttctagaggatattataatagatatacaagattattcaattaaagcaatagttataagctcagggttagtagataaaatgataaagggtaagcaaattattctcttaaatagatgcattctcggagaagaatatatattatatacaggaaatgagggagttatgtttaaaactttacctcataatatggataggcacaatgcaattaagaaagcataaaaaagcaattcttctaggtataaccctattatgctttattagcttaatattagcttacatttttaataaatcaataaattcaataataaatattattttagcatcttttattttagcttatactttgacccctattagggatggatttgaggcaaaatttagaataagtaagaaaatatcttcgatattagttatattaataattataggtattataactgcatgcataattgttatagttcctacgctatttaatgagatatccaatataagtaatatatttgataacgtaagcagcttgctagaaggaatgttaaaaaaaaataacttggatgacttttctactaccaatgtaatttataatgaaattttagaaaaaggaaatgctttttggacaaatttttcagaaaatgcagtggaaaatttaatgagcattggagataacgcaatgtcacttgcaataatacctattatggtttattactttctttgcgatggtaataaaatatacagtaaaatgctgctgttattaccaacttctaaaagagggcttactaaaaaaatattaagcgatattgatagagtgttaacaagatatatagcaagtcagttgatgctttcgggattaataggcggattaactttgatattgctattaatattaaaagtaaaattccctttatggatttctatactaaatgcaatcctaaacataataccttactttggacctatttttggtgcagttccggcggtaatagttgcacttttagattctccaataaaggcattttgggtaattgtaggtatgttcataattcagcagcttgaaggtgatattttgtctccgaaaataacaggggatagcacagagatgcatccatttgttataataattttattacttataggagataaatttggcggatttgttgggatggttttagtggtgccgatagctgtaattataaaagttttatatgatgatataaattattatctgttttagattttatatttatataaaaaagcttatgcattaggggatcacaaataaagttgaatattgacataattatctatatgaaatataattttgatgaaataattaaatattaagcgatgaataggataagtaaatttatcatagtcatttcagagaaaaagtggttggtgaaaacttttggctatatattttgaagctacctaggagctataaattactaagtgatgtataagtatattatacataattagggtggtaccgcggaattctagctttcgtccctatatctatttggggagagagctttttttatttgataaattatacacctataaaaagagcagctatgctgcaaataagaacttttcacctataaaaagagcagctatgctgcaaataagaacttttcacctataaaaagagcagctatgctgcaaataagaacttttcgcctataaaaagagcagctatgctgcaatacggaacttttctgcaataaggatattttcaaatttgaaaagagcagtggttctacaattaaaatcttatgactaataattatgaaatcttaaatcttcataagaagagtataaacaataaaaagatattctcaatggatatcagcatcaactgttaactaaaaaaatggaggaatagtttatgaaatttatgaaaaccaatgacttaagagaagcatacttgaaattttttgaaagtaaagatcatttaagaatgaatagtttttctttggttccaaagaatgataaaagtttattattaataaatgcaggaatggctccattgaagccttattttactgggctacaagagccaccaaagagaagaattacaacttgtcaaaaatgtattagaacaggggatatcgaaaacgtaggtattacaagtagacatggtactttctttgagatgcttggaaacttttcttttgcagattatttcaagaaagaaataattccttgggcttgggagtttatcacagaagtgttggaacttcctaaagatagattatatgtaactatatatttagatgatgatgaagcatatgaatattggactacacttacagatgtagataaaactcatatatttagattaggcaaggaagataatttttgggaacatggtgcaggtccatgtggtccttgtacagaaattcactttaatagatcagaagaaataccaactgacgctgatgagttcgttaaattagcagatgaagataaaataatagaattctggaaccttgttttcactcaatttgatggtgatggaaaaggaaactatgaaaaacttgctaacactaacattgatacaggtatgggacttgaaagacttgcaactataatgcaagaaaaaaatagcatttttgaaattgatacgttagaaaatattttaaatgaagttgcaaaattagctaatgttaaatatggagaaaatcaaaaaacagatatatctttaagattaataactgaccatattagatcaataactttcatgatttcagatgatgttatgccatctaatgaaggcagaggatatgttttaagaagacttcttagaagagcagcaagacatggaaaaactttaggaattaaagaagcattcctttgtaatttatgtgacactgttataagagattcaagtgaggcttatccagaattaaatagtaagaaagaatatattaaaaaagtaattaaaatagaagaagataaattcagagaaactttagattcaggaatggaaatattgaatggatttataagtgaattaaaagcaaagaatgaaaaagttcttagcggtgtagatggattcaaattatatgatacatttggtttcccaatggaacttacaaaagaaatattagaagatgaaggtttatcattggatgaagaggctttccatgaagaaatgaaagttcaaagagaaagagctagaagtgcaagaaaagtttctaattacatgggaactgatgttaagacgttagatattataccagcagaagttgaaactgtttttgatggatatgaaaatgatactttaaatgcagaagttaaagtgttaattgaaggggaagactttacagatactataacagaaggtaacaaagctattatagttacaaatgttactcctttatatgctgaaatgggtggtcaaataggagacacaggtgtaatattcaatgacagttttaaggctaatgtacttgatactaaaaagaacataggtggaaaaatagttcattttgttgaagttgtatcaggagaacttaaagtaggagatacagttactattgaggtggataaagttagacgtgaaaacattaagaaaaaccatactgcaactcaccttttagataaagcgttaactgaggttcttggatcacatgttcatcaagctggatcatatgtaagctattatagacttagatttgacttttctcactttgaagctatgacagaggaagaaataaataaggttgaagatttagtgaatgaagcaattacaagcgttacaccggttgttacagaagtaatggatcttcaagaagcaaaaaatagtggagctataggtatatttgatgataaatatgctgataaagttagagttgtaagtgcaggtgaatactctaaggagctatgtggtggaacacatatagacaacacaggaaagattggtttatttaaaatcatatctgaaagtggtattgcggcaggaacaagaagaattgaagctgtaataggaaaagaagcttataagatagtaaatgaaaagaaagatttgttaaaagaaatttcaactaagcttaaatgctcagaaaaagaattgttagctaaacttgatcaacaagttaaggagcttaaggaaaaagataaagaaataacagttttaaaatctaaattcgcatcaatgggaatagatgacatagtatcttcttcaagaaacgtcaaggatataaatgtaatttcttatgaattaaaagacgttgatagtgatactttaagagatgtttgtgaaaaagtgagagataaagctccaaatagcatagttttacttatgagtgcaaatgctggaaaagttattatttgtgctatggcaactaaagatgcagtagctaaaggtgctcattgtggaaaattaataaaagaaatatcttctatgcttggcggcggaggcggcggaagaccagacatggctcaagccggtggaaaaatgccagaaaagatacaagaagcaattgaagaatcatataaaatagtggaaactttagcaaagtagtatactttttataaaaaataggttataatctaattatagttagtgaataaatttaaaaaataaagttaataataaatatggatatcgtttccttataaaatgattaagggggtgagttgctttaagtagcaattttatgagtaataatattgaacatacaatgcaatttgatttaagtaagaataaagaagctcttacaaaaacaatattaacagaggtttataattcattacaggaaaaaggatataatcctataaatcaattagttggatatttgatttcaggagaccctacttacatcactaattacaacggagcaagagctttagtaagaaaactcgaaagagatgacatactagaagaagttataaaatcttatttagagataaagtagagagtgcccgtttataacgggcacttttaattttagtatatgaaagaaagtgcaatatcacgatttggttgatacttgctgcttatatgttgtgagaggtgctgtaatttgaggatacttggattagatttgggttcaaagactataggagtggcagtaagtgatccattaggattcactgctcaaggactgactacagttagaagaactaataaagaaaaagatataacggaaataaaaaagttttgtgatgaatatgatgcaaaggttattgtaattggattaccaaagaatatgaacggaacaataggaccatctggagaaattgcgatggcttttggaaagattatagaagaagaacttaatgtagaagtgaaattctgggatgaacgtttaactactgttgcagcacataaagcaatgcttgaagctgatttgtcaaggaataagagaaagaagatagtagataaagttgcatcaacttacatacttcaaggatatttagatatgatttcaagacagtaaatatctgatagaataggaaaatttgagaagtatatgtataagattaatttcttatacaatatgcttttattaataaatatatattgcaaaaataatccttatcataattctaaaaatattgcaggaattttaaccgcgattgtgaattgtgaaatgtgcattgtgaattgcaacataaataaaaataaaatacagaagggatacatttatggataaggaagcaaaatatgtatatatacctgatcaagaaggaaatgatgttaagtttgaggttattatatactttgaaatagaaaaattaaaaggccaatatattattgcgactcctgcatttgaagaaactgatgaagcttatgcttttaagatattcaaagatgaggatggaagcgatatatttatagctttagaagatgacgacgaagaattcgaaatggtattagaaacttatgaaactcttatgaatgaagatggtttaattgaggaatagtatacaatctagtaatatgatattttctttaatgtttatttagagaagaatcaattcatttaatatgaaaagtgaggtgtcatgtatggatgcatcaaatttaattgatatgaatgccttgaaggaagacttgaaaaaaaagggttataaattaacaccacaaagaagatcaattgttgatactattattgaaaatgaaggtcaacatttaacagcggaagaaatatatgatagtgtaaaaaagagttgcccggaaattggattagcaacagtatatagaactattcttttgctagaagaattaggagtaatatctagattagatctaaatgatggatgtagtagatatgaaatagtgcattcaaatgaaacgcacagacatcatcatcttatttgtaatatctgtcataaggttttagaagttcaggacgatttgttagaggatttagaatctggaatcgaaaatcaatataagtttaaaattttagaccatagtgtaaaattttttggcgtatgtgatgaatgccaaaagaaactaagtgatgaataaaaggacttttaatagaaaattagaaataaaataaagtcaaaagtgtgtcagatattttgccgtgaataaagtaaggatatatattttacggtttatatatttactaagaaaatgcatttggtgccatgcttaaaaaggtatggtgtcaaagggcaattgttattgaggtatatatatttaaagtgaattaatatggctaaaccttatatgctaaataaagcaatgtaggcttatagattggaatgtggattaaggtcgcctatattaatgtgaaatatattgtcacataggacttgttattttttaatactaaagaaagaacctttgtttataaataatattaggaaaaaggaggggaagtatgaaaaatgaaagagcgaagataaaaataattcctcttggtggtataaacgaaatcggaaaaaatataacagctatagaatataaagaagatattattattatagactgtggactaaaatttccggatgatgatatgtttggaatagatattgtaataccagatgtttcatatctaatcaaaaattcagagaaaatcaaggggatatttttaactcacggacatgaagaccatataggagcgttgccgtatgtgcttagacaactaaatgttcctgtttatggcactaagcttactcttggaatagttgaaacaaaactaaaagaacatggtttgttatcttcaacagagttagtaagagtaaagccaaaggatataattaaacttgatagcgtctcagttgaatttataaagactaatcactcaattgcagattcagttgcaattgcggttcatacaccacttggggtagtacttcatacaggagattttaagattgattacacaccaattgatggagaaatgatggattttggaagattagctgaacttggaagaaagggagttttagtattaatggcggattcaacaaatgttgaaagaccgggatatactatgacagaaaaagttgtcggagagactttcttaaggctttttgctaaggctaagggtaggttaatagttgcaacatttgcatctaatgttcacagaattcaacaaataattacagctgctgaagcttatgaaaagaaggtagcagtttcaggaagaagtatggaaaatatcgttcaagttgcaatagaacttggatatcttacagttggaaaagatgtacttgttccagtggatcaaatttcaaaatatccaaacgaaaaaattgttgtaataacaactggaagccagggggaaccaatgtctgctcttgcaagaatggcagcatcggagcatagaaaaattaatgttattccaggcgatacagtaattatttcagcaacacctataccaggtaatgaaaaatttgtttcaaaagttataaatcaactatttaaaaagggtgctcaagttatatatgattctcaagaaaagattcatgtttcaggtcatgcctgtcaagaagaacttaaattaatgcaggctttagttaaaccaaaattctttgtgccagttcatggtgaatatagacatttgaagaagcatggtgaattagctatggaagttggactttcagaaaagaatttattaatacctgaaaatggagatgtaattgaagtagcgagaaattatattaaaaagaatggaactgttgtatcaggtcaagtatttgttgatggtctcggtgttggagatgtcggaaatattgtcttgagagatagaaaacatctttcacaagatggtatcttaacaatagtagtaacaatagaaaaacaaactggaagggttgtatccggtccagatataatttcaaggggattcgtctatgtgagagaatctgaaggtcttatggatgaagcaagagaaattgttaaatctgtattaaagacttgtgaagaaaaacagattactgactgggctacattaaaatctaagatgagagatcaacttagagagtatctttacgaaaagactaagagaaaacctatgatattgccaataattatggagttttagaaacatgaaagaaaataacaattctaaaactgtagagaatatattttattattaataatttaattatgaattaatgaaatattaaattgttaaatatatattctttggaatagggttgactttttttgatgaaaagagtagaatttataatagttgtgtaggaattggatactttaagtatccaattttcttttggagaaaaacagttataggtttacatttatatgtgaataatttttatcgcaatttatttataataatagtaataatatattaacagtatgaaattatttacagtatatacttaaattttaactaatttatatacaaactaaagataaactataaaagaaaaattcgcagcttgcttgctgtttggaggaataataatggaattaattaaaagagaagatataagaaatattgctataattgcccacgttgaccacggtaagacaactttagtagatgctttattaaaacaaagccatacatttagagctaatgaaaaagtagaagaaagagttatggattctaatgacttagaaaaagaaagaggaattacaattctttcaaagaatactgcagtaatttataatgatataaaaataaatatagtagatacaccagggcatgctgatttcggtggagaagttgaacgtgtacttaagatggttgattcagttttgcttgttgttgactcttatgaaggaccaatgccacaaactaaattcgttttaaagaaatcattagaattaggtttaaagccaatagttataattaacaaaatagataaaccaaatgctagaccaacagacgttattgacgaagtatttgatctattcgtagaacttggagctaatgatgaacaattagatttccaaattatttatgcgtcagctagagaaggctttgcaagatataatgtagatgatcaaaataacgatatgactcctatatttgatacaatattaaaatatgttgcaccaccagaaggatatatggatgaaccacttcaaatgcttgttagtacactagatacaaatgcatttgttgggaaaattgcaattggtaagatacatcgaggtacagtaaagagaaatcaaacagttgctttattaaagaatgatggatcaagcgctaattacaaaataactagtatattcacgtataaaggattaaagagagaagaagcagaagaagcttcaatgggagatatagttgcagtaagtggtgttattgatgctaatataggtgatactatagcagattcatcatcaccagaagcattaccattccttgaaatagatgaaccaacattaaatatgaacttcatggttaatgattcaccatttgcaggtcaagaaggtgagttcgtaacatcaagacatttaagagatagattaatgaaagaacttgagacaaatgtaagtttaagagtaaaagaacttactccagattgttttgaagtttcaggaagaggagaacttcacctttcagttcttattgaaacaatgagaagagaaggatatgaattccaagtttcaaaggcaaatgttatatttagagaagtagatggccacaaggaagaaccaattgagtacttaacaattgatgttccagaagaatttatgggacctgttatggaaaagttaggaccaagaaaagcagaaatggttaatatgacatctgcagtaaatggatatacaagattagaattcacagttccagctagaggccttattggatttagaagtgaattaatgactgatacaaaaggtaatggaattatgaatcacgtattccattcttatgaaaaatacaaaggtgatattccaggaagaagcagaggatcaataatttcattcgaagcaggagattcaatagcatatggattatatagtgctcaagaaagaggtcaattattcataggtgctggtgttcctgtatatggtggtatgattgttggggtttctgcaagagcagaagatcttgaaattaatgtatgtaaaatgaagaaacttactaatacaagatcatcaggtgctgatgatgcattaaaattaactccaccagttgaaatgtctcttgaacaatgtttagaatttataaatgctgatgaattggtagaagttacaccaaagaatataagaatgagaaaaagagtattggatagtgctgaaagaagaagaatgattagcagaaataaaaaataatttgctgaaaatactttaactattaaataaaataaatataattaaagtaaatggtctttatttggctatttacttttaattatatctaggagaaagtagaaaaagtttatgaataaatataaatcttttagaaagctaatactgttaatcatattatttttatttgtaataactctgacgtttgtaatatcttatagtagtaccataagaaaaccattaaagtcagctgaagactcaattataattgaagtcaaacaaggcgaaggtttttatgatgtattggataggttggacaaagaaaataaattgaccaataaacttcttattaaagtaaatctggctatagataaaagaaaagtaaacttaacagaaggtatatatgaaatcaatacaaattcatccttagaagagctgataaaatctttagaaaataaggatggagataaggatttagttaaattaactataccagaaggttattctatagaagatattgctaaaagcgtagaagataaaggtatttgttctaaagacgaatttattaaagatgttaaagattacaaattacctagttttgtgaaaaataataacaagaagagatataatttggaagggtatttatatcctgatacatatttaatagaaaaagggtcaaatgcaaatgaagtaattaaatctatgctagatagatttgaagatgtgcttaagcaggctgaagatgaaactaaagttgaaataaatgatgaagatgtagaaaaaatagttactatagcgtctatgatagaaagagaagcaagagtgcctggtgacagaccattaatatcatcggttatttacaacaggttagaaaaagatatgaaacttcaaatagatgcagcagtaatttatgcattaggatatcatgttgatgtagtattaaacaagcatctagaagtggattcgccatataatgtatacaagtataaaggccttccagtcggtcctatagcaaatccaggtttagactgcatcaaggcagcattgcttcctgaaaagacagattatttatattatattatgaaagatgatggagcacattattttactaataactatgaagattttttaaataagaaaaaagaattgggatactaattgtaatgcacaattcacaatgcacaatcgatagttgtgaattgataaattaagttgttttttgtttatctataatacagatttatggaggaaattcatgagcgaaatcacatatgactatatggaagaatatattagaagtttaattcctgagagagaagggacattaaaggaaatagaagcttttgcaagagaaaatggggtacctattgttcaaaaagaaacaggtgtatttctagaattcatgactagtatgaagaaaccaaaaagaatattagaacttggaacagcaatagggttttcatcaatactaatgtatcaagctgcgggaacagagccggaaattgttacaatagaacgtgatgaaagaatgattgaacttgcaaacattaatttaaagaaatttaatttagaccataagatcaagattcaagaaggcgattgcttagagattttagaaaaattaaatgaaccttttgatttgatttttatggatgcaggcaaaggacattacaaccactttttgccacactgtttaagattacttaatccagacggagtaatagttgctgataatgttttatttagaggtatggtggcatcacaagaattagttaaaagaagaaaaatcacaatagtaaagagaatgaggacttatttggaattagttactcaagatgaaaacttaattacatctgtcataccaatgggagatgggattgcagttacaaagaggaggtaaattaaaatgataagaccagaaattttagcaccagcaggaaatttagataaacttaaaatagcaatagattttggagctgacgctgtatatcttggcggaagtaaattaaatttaagagcatttgcagataattttactaatgaacaattaaaagagggcgtgaaatatgctcatgatagaaatagaaaagtttatgtaactatgaatgttttccctcataatgcagatttaggtggagtagaagattatataaaggaattatatgaaacaggtgttgatgcaataatagcatcagatccagcaataatttcagcagctagagaagttgcaccaaatttagaaattcacttgagcactcaagctaataatgttaactggagagcagctaagttttggtatgaacaaggtgttaagagaatagtaatggctagagagcttagcttaactgagataaaagaaatgagagataacttaccagaggaatgtgagatagaagcatttgtgcatggttcaatgtgtataagttactcaggaagatgtttaatttctaattatatggttggaagagatgctaatagaggagcttgtgcgcaagcatgtagatttaaatatcatttggtagaagaaaagagaccaaatgaattttatccagtagttgaagatgaaaatggaacatacataatgaattcaaaagacttatgtatgattgaacatatagatgatgttataaaggctggagtatactctctaaaaatcgaaggacgaatgaagagtctatattatgttgcagcagtagttaaatcatataggcaggcagtagatgcatatatgaaagatccggataattataaattcgatccaaagtggatggaaaatttaaataaagtaagtcatagagtttatcatacaggtttttactatggccaaagtggagagcaagtatacgaagattcagcgtatataaggcatgcagacataataggaatagtaagagcatacgatgaagaaacaaaaatagcaaccattgaacaaaaaaacaaagtattaaatggtgatacagtagaagttttaagaccagaaggagataatttcgaagttgttcttcatgatatgacagaagaaaacggaactccaatagagtcagcaaatagagcaaagatgatatacaaagttagagtagatattcctctaaaagaaaaagatttaattgttaaagacaaagaatagtttatttaatgggaggttgttcctcttttgctactccaaatctcacatttggagtaggctaaaggggtgcaatctcccgttttgtgttttaagcaaaatttttatggtactaattaattataaagctcaaatgtatttgatttgggtatatataatagttataagctagatacatactatgaaatatatcttaactagaaataaggattatacttttgtgaaatgtttcgttaggaatttgatggttctgattcttagattaaaagttgttacaagtatgctagttcaaagcttgtctttgaggctagcatcttgggtgcaacttgtaatcttagaatcatccatcataattccttagaaactggaacaacagtataatccttatttcggcgagctataagcgtaagtttaggtctcacttggtctatctatagagatatataagtctatatattttgaataaaatatctcctttaaggctagaatctaagctagagagggaggtgtttttcatttttactgaaaaatttgatagaaataagagattaattcagattctagctatgcttatgactgtaattgttatgctaacagcgcgtttaacaatattgcaaatatatccatctgaaagagttgtgagttcttatcaaaatcaccaagaagaaaatattagcaatatgaattatatgattttagacactaatgggaaagatttaatgaagtataacaaaaaatacgtacttgtcattgataccagaccattcagtttaaataattatgaagaaacacttgaggatttaatggcgtttaatttcataatgaaatctgaaaatcctgattttagttattcagatataatgaaacaaagtggaaaattatattttaacatatcagaggatacatataacaaaattaataatctaaaaaatataaaaggaatatatacttatatttctgatgaagtagatactaaaaaagcgtggagtgtcagcagtatgttatccaaaatattagatgaggagcatgaagcaggaactcttgaaggtgatatgtacgattatctaaaagataatgaaaaacccaaaagcgaattttatttagataataaagccgtttatgcgaaacaatcagtaagcataagcgatgataataaaaatttaaaattaactattgatagtgatattgaaaataaaataagagatattttggataaagaggaatattcatatttaagcaatgtaggggtcactataatggaaagtgatacaggtaaaattagggcaatggttcaaaaggatgaaagtgctgcgaatgtgaatttaggtatacagcaaattggatatgaacctggatctatttataaagtgataacactcggtgcagctttagacatggggcttataaatgtgaatgatacatttgttggagcaggtaagatagatagaaaagtatatggtaaattatcagttgagcaggcttttgaaaagtcttctaatgatgtatttgccgatataggagcaaaagttggctatgataaattaatggattactcacagaaattaggattatatgatagagtactgaatttaaatagtggaattgtaaaagaggcacaaggtgttaaaccagaagaggaatctggaataaacaatatatctataggacaatgcatgaatgtaactccaattcagatgctgggagctataaattctataactaataatggggtttatgaaaagccatatttagtcgaaggtattttagacaaagatgataatttaataaaagagtttaaaactgataaaaagagagtatttagtgaaacaacagcaaaaatagttaagaatgaaatgaggcaggttgttttgaaaggaacaggaataaaggcctatgagtcagatcttgatataggcggtaaaactggttcggcaacaggtagtgaaggtaaaacccatggatggtttgctggatattttagtgcaggaggaaaaaactatactatggtagtatttactccagatatacagatggataaggatgctaataatgaagatcttggtggtggtgatactgcagcaccaatatttaaagatatagttaaaactttaaatgcgaagtagtgaaatttaagtactgccatattatatatagtgaaataataaatttatatttagaattctagtgaactaagtgctaaattaagcttggaatatagaaatttaattgtaatatatatgttctaaaaaatttaattcataagaacgtatattataatatcagatactgtaaaccaaataattttatgaagaatgaatcataccatttagaacctatatgttaaaatataaatataaaaaataaaaatgtataagcaacttttttggtactccaacatattataatatcaagcactgctatggaggaaaaaggtgtttatattaaatagctttatagacctaatattaaattcactattcctaactggatatgtaacaaataataatacatttccactacctttagatgaaacagaagaacaaatgtatttaaaaaaatttaaagaaggagataaaaatgccaaaagtattttaattgaaagaaacttaagattagtagctcatatagtaaaaaaatattcgtttcctaataaggatgtagatgaattaatttcaattggtactgttggattaataaaagctatcgattcttttgatgcaggcaagggtactagacttgcaacttatgcttctagatgtatagaaaatgagatcctaatgctgtttagaaatagtaaaaagcaaaaaagtgaagtttatctccaagatccaatcggagtcgataaagaaggaaatgaattttgtcttatggatatactaagcagtgaaaaagatagtgtcttagaaaaagttgaaagcaatttacaagttagagctctgtataaaaagttgattgagtcattaaccaaaagagaaagtgctattataataatgagatatggattaattgatggaaaatgcaaaacacaaagagaaatagcagtaaatttaggaatttcacgatcatatgtatcgagaatagaaaaaaaagctttaaaaaaattaaaaaaagaattatttactaaaaattaatttagtgcatagagaattataaatctttatcactataaagcgatgcgctgctatttagtatatatgtacttaataatatccattttcattcatattagtgtaatgttaaaagaagttggaaggataaatattctatatttatataaagaatattgacatactttaaacaagggtgctatttttaatatagcaccttattttttataagatataacaataatttacttttttaaattacagatagaggagaaaacttatggctaaaatagacaacttattagatagaattgatctaactagcgcatcagatattcacttaacttcagaattgccaccaatggtaagagtagatggtgatttggttattgcagatgaaaatgcagtaccacacgaagttgttggagaatatattagagatctaatgccaagtaaatatgaagagtttttagaaaatggagaaatagattttaaatataataagcctggtttaggaaacttcagagttaatgcatttaaatgcaaaggtaactatgctatatgtatgagagttataaaggaagctataccaaagcttagggatatatcagatgcgccagctttaaaggattttactgaattacaagatggattggttcttgttactgggccaacgggatcaggaaaaagtacaacacttgctgccatggtaaatgaaataaatatgactaaagaaaagcatataattacattggaagaaccaatagaatatatctatgaaacgaagaaatcaatggtaaatcaaagggaagttggacaagatacaaaaagttatgcaatgggactcagagcggcattaagacaagatccagatgttatattacttggagagatgagggatcctgagacaattgaaatagctttgagagctgcgcaaacaggacatttggttttttctactttgcataatatgggagcagcaaatagtatatatagaattataaattcttttgaatcaggccatcaaaatgaagtgaaaattcaactatcatcattgcttaggggagttgtttctcaggtattattgccaaatgcgtcaggaaagggtagaactgctgcaatggaaattatggtatgtacctctagtataaaaaatcttataagagaaggaaattttgagcagattaacagttttattcagatgggttctaaatttggtatgcagactattgagatggatttaaaaagattagtaagtaataatactatatcgagagaagaatatgaaaaatggatacgaaataataaataaaaaataataactgcataaataaaaaaggaattttaataaatatgttgaatatattgcaattagtagatttttttctgcggagaagggaaagatttaatcatgcaacaagagataattacgtccttagattttggtactcaaaaattatctgctactgtagcgattagagaaaaagatgaactgaaaattttgggagttcaatcatgcaaatcagcaggtatagagaaaggtttgttggtagatattgataaatgcagggatgttgcagtaaatttattaaaggatttagaaaaaaagacaagagtaaaaagtgaaagaatagccattggaatttcttctaataaagcaagaattactgaagcgtcaactgtagttaatattcaagaaaaagttacaagtgcggatataagaaaagcgctgaaaaatgcacaaagagattttattttaagtaatgatgaatgtatagtagatgtgcttatcgatttttatatattagataacaaggttatacgaaaagatatattaaattggaaaggaagtaaacttgaaataaatctcaccttagtaatagcagctaaaagtgaaatagaaaaatattatgaactttttagaaaaacggagtatgatattgcatctataaaattgaatatattagtagggaagcaagtgttcttaaatgaaaaaaactctatggagaatatagtgattgcagacattggagctgggactactgatatagcattatttacagatggaattcctaaaagcataaatgctattccaataggtggaagaaatataactagagatttggcaatttgcgggaagttttcgtttctaaaggcagataatatgaaaaagatttactctagcaattataaggctttatatatggataattcgcttgaagaagaaattgatgtaggaactactaaagtatccaggaaattattctatgaagtggtaaatgctagaattgaagaaatattaagccatatcaatataaaattaaaaaatactggtcattatgatagaatttgtagtataattctatatggggatggagttaattatttcgaggatatagatgaaatcgttcgtaaaattttcgaaataaaaactaaagttataagaaaaaatgatttgggaataaaaaattcagaaaatataacttctatggctattgctaaggaagtatatgatagattaaatttattagagaatgataatataattctaactaataaacataatgataataaagtaattaatgaaaaagaacatttacacaataatgaaggtgaaaatcatattctaaaaaaagttaaagttttttttgataagattttttaaggggaggaattgttttgttagattttgagacagatatgcaagagttaaccaatataaaagttattggttgcggcggcggcggaagtaatgccgtaaatagaatgatagttgaaggactaaaaaatgttgaatttattgcaataaatacagataagcaagcacttatgctttctaatgcagatcaaaaaattcaaataggtgaaaagctaactaaaggactaggagctggagctaatccggaaataggaaagaaagcagcagaagaaagcagagaagaaataacagcttctataaaaggagcaaatatggtatttattactgctggtatgggcggcggaacaggaacaggtgctgcaccaatagtagcggaaattgctaaatctatggatattttaactgtaggagtagtaactaaacctttcccttttgaaggtaaaagaagaatgagacatgctgaaatgggtatagcaacattaaaagaaaaagttgacacattagttataattcctaatgaaagattacttaatatggctgataagaaaacaacattgttggattcatttaagttagctgatgaagttttaagacaaggtgttcaagctatttcagacttgatcacaattacaggtgtaattaatgctgactttgcagatataaaagcagtaatgcttaataaaggactagctcatatgggagttggttttggtaaaggtgacactagaacacaagatgctgttaaacaagcaatttcatctccacttttagaaacatcaatagatggagctacagatgttattataaacttcactggtggagcagaccttggagcattagaagtatatgatgctgctgatgttgttcgtgaggctgtagatccagatgcgaatataatcgtgggagctgttatagatgaaacacttaatgaggaaataagaattactgttatagcaactggatttgaaagtgaaaacaacagattatcattaggttctatagttgaagaacctaaaaaagttcaacctcaagctaaggaagtagcaaaagaacagcaagaagttgcagtagatgcaaaagagccagaaatgaattctaacaattatgagccagatgatttagatatacctgttttcttaagaagacaaaagagacattaataacggaatttataatattaagaaataaagttaaatagaatgaaaatttgttttagaaactgaaaatctattaaatagttttttagtctttgatatacaagttttcattctattttttttttttgttttttagtatgttatatttttctcagaaacttgtcatttgtatcttgccacctggtactaatggagacattatctttaacttattattaacataatttgtaattcgtttatttatttatgtataaacaacttaagaattttatttacacttttcaataaataccatactagaaagtagaaacatttttatgcaacaggcattgaaaataagctgttaaaagctcttaattgtaggttgttcaactaatgtttgtcacaatgaaattgggagcaagcattagttgtgcaacctacaatttagaattttcagcgaaattttcatagtcctgtgaaataacaatgtttctactttcggtggattagtgcataagtctacgttatatattgtttatctataaatttaaattacataattaaatttagaatagaatgacttaaaatttattccacttatttttagcaaatttatataagataaaagaatttatttttacatattaagttagttttaaatataaaaaagagtacaaaaaaatatagtgtaaataaatgtaaaaagtttaattaaaaaaacaaaaagatttaatgtgattgtgacaaatttttatgagaaagaagtatataataaaatccagacagactggaggcgttgagatggaaatttatgttgataccttagttttggaaaattgcatagtaaatttctttttgttaacagtaactatgaaatgcataaagcataaatgtaaggtgattgcgctcttaagctccagtttattgggtggaatttatacattggttttagttattccacagttaaacatattctcttgtttacctattgaattaattgttgctttcataatgctcagaatagtgtatggaaaaacaaacattcttaatatgatcaagattcttattatatttctaatgatgacatttactttaagtggagtatgttttctattttcgttaaagcaaaatttatatttattaggaactacattcaaaatagagaagtattcaattaagtatattatgctaggagtaatgattatgtatataatttttagcagacttgtggaatatattaaagacaagctgttcgtaaggaattttgtttttgagattgaattcaatatagaaggtaagcaatatagtattaaaagctttttggatactggaaatgagcttagagagccaattacaaatcttccatgcattttaattgaagaaaacctaataagtgatgtggattttaatagtattaatacatatcatgtgctttacagttcaataggatatggaggaagtcttaaaggtataaaagttaacaacataaaaataagcaataattatcatctatatgaagaagtcgatgcaataatatgtccatgtaaagaaaaattaagtaaagaatgcgaatttaatgccttattatcaaggggaatagtctggtagtgtaaaaaatatatgaaaaatcaatccaactaccatttaatgttaaattatgtttgctagttgcccttgacacacctaaagataaatggtcttaggcagttaaggacgggtgaatgataattttgaacatgactaatagacccgcctattgagatattttaccatttatctttgtgggcgtgtcaagggtgcgtttcaccaactgctttagatcattaggcagttattgtacagttatttagaacaaagtcttgagatagttcaataaatttgcaccatctagtaggcatgttggacattgactctaactcttcaaggattacaggagttttgccttcaagggcagaatgtggtcttagaaagttaaagtatgccacaaacatagttacaaatgcaaccgacccgttaggacttccgaagccagtagtagctctataattgcctttaaaggttcggttaagacgttcaataatttgcttcaatggcctatattcttttgaaacttcatctttattggttaagcctataacttgagtaacatcgaattttatactatggcttgcaaagaagtgctgtgcaagaagatatatagggttaccatcagttataagattaagatcttcaggtatttcttttaacttacttagaacatcatcgatggcttttacagccgtttcggtatctctatgtggtgatactctgtaagatagaataatctttttaacagcatcaaaaaagaagaaaatatagttccacttaccgttaacttttatgtaggtttcatcgccgcagaaagagtcagaaagtttataatcgtagttatctataaatggcttaactacaattgaaacggcattaacatagtttaaaattgcttgatgagatattttaatatcatgaatatctttaagcaatgcagctgtctttctggaagataaaccgtagttaacgtagtaagttagaatgagtcctaaggtgtaagaagaaatcataatgtttggaagagaaacctttgattttaccggactttctttagaaagtggcttaaagtcaaaagtgaaatctctaaatatgtatctaactttgaacttaccaggattcttcttaaaatcttgtttttcagattttgtcattgatttaagattattttggtaaaaagagcaattatcattcttacacttataaacgtagaaatccttacgcgccttgattctttcaagtgttttactgcagtgaggacatcttaacactatggatttctgatagtaatttttaggattgaatgtggtatcacagactttgcaaagatattgtcctcggcctccgttattatcgtaaagataggtatgtggagcaccacacttaggacagataacatccttaggagctaacgctttgtttttgcgaggtttcacaggagcaaattctttgccgtgcttaaactcatattcagctattagaagcttatagttaagtttttcgggaacatcaaagattggttgatcatctacttgaagctttcggtattctttcttaacaggttcgtccgaaatgcttttaagcaagtttttgccaaccagcaaagtcatgagatactttataatttcaataagataaattacagtttcaagaagaaacttattaatcatggtaatagcttgcctccttttttagttcagtgtttttgttttgcaagtataaaatatcttaactttttgggggtggcaagttatttatataaaaaataagaaaaattaaagggttgctgccttagttagataaaaaactttgacagtaccaatagtctataagggggatatttatggaaaagttagttctgttttttaataaattattatgtaagttcaagttgtttagaaaaaagttatattatgtaggaggaaatgatgctctaccaccaccattatcaaaagatgaagaagaagatttagtgaataaattaaatggtggagatgaaaatacaagaagcactttaattgaaagaaatttaagattagttgtttatatagccagaaaatttgaaaatacaggtgtatatgtagaagatttaatatcagtcggtactattggattaataaaagcagtaaatacttttaatccagagaaaaagataaagcttgcaacttatgcttctagatgtatagaaaatgaaatacttatgtatctaagaagaaatagcaaaataaaagctgaaatatcattttatgaacctcttaatattgactgggatggaaatgaacttctattatcagatatattaggaactgaaaacgatactgtttataatttgatagaagatgaagtagataagcagttattagtcatggcattaaagagcttaaatgatagagaaaaagaaatagtaagacttagatttggtttaaatggaacaagagaaaagacgcaaaaagaggtcgcggatatgcttggaatctcacaatcttacatttctagattagagaaaaaaataattaaaagattgaaaaaagaaataagtagaatgatttagcttgtcttcaagtataaaagtattgcctatcggagataatgtttaatgcaatggattattactttcgaaggggtgaatacttgtgataattaacaaagtagaaatatgtggcgttaatacttcaaaactccctatacttaaagaaaaagaaaaaaagcaactttttttacaaatgaaagctggagataagaacgcaagagaaacatttataaagggaaatttgagattagtacttagtgttattcaacggtttaataatagaggagaaaatatcgatgacttattccaagtgggctgcataggcttaatgaaatcaatagataattttgatttgtctcaaaatgttaaattttcaacttatgcagttcctatgataattggggaaattagaagatacctaagagataataattctattagggtaagtagatctttaagagatatagcttataaagctcttattatgagagaaaaatttataaaagacaataataaagagcctactatatcgcaaattgcaaaagaacttgaattgccaagagaagaagttgtatttgcattagatgcaatacaagatcccgtatcactatttgaaccgatttatcatgatggaggagatgccatttatgtaatggatcaaataagtgatgccaaaaatacagatgaacattggcttgaaaatatttcaataaaagaagcaatgaaaaaacttactgatagagagaagcttatattgaatttaagatttttcaatggaagaactcaaatggaagttgcagatgaaattggaatttcccaagcacaagtttcaagattagaaaaaacagcactaaagcatatgagaaaacacgtataagaatgagagtttaataatattataatggtgggggataattatggaacttgaattacattcactcaatgctatgagaagtatggaagttatagatgtattaacaggaactaaaatcgggtttataaaagattttaagatcgactgcgatgaaaataagatagttgcgttaatattaccaggagaaataaaatcatggtttgcaaaagaagatgaaaaagagattttgtggagcgatatagtaaaaataggaacagatgttatattggtgaaggcaaaagataaagataaagtaaatgcaaacaatgtatagccatatttcaaaaatatagttataataagtataggttttgatatacgaaagcaaagaggtgaatgaaagtatgaaatgtccattttgcggatttgaagaaagtaaggttgttgattcaaggtcaacagatgacaatacaacaattagaagaagacgagaatgtttaaaatgtaataagcgttatactacatatgaaaaaatagaggattttccaatcctagtaattaaaaaagatttaactagagaaaatttcaacaaagaaaaaataattaatggattaattattgcatgtcaaaaaagacccatatctagaaagcaaatcgaggaaatagcatatgatatagaaaaaacaatatctaacagtatgcttactgaaatcccatcaaatgaaataggggaaatggttatggctagattgaaagagttagatgaaatatcatatgtaagattcgcatcagtttatagacaatttaaggatatagatactttcctagaagaaataaaaaatcttagaacataatcacataattaaggatgttgaaaagttttcaatgtcctttttataatgaaaaatgttagatataagttaaacttcagttaataaagatgtcaagcagctaataaaatgttaatattaagtaaagaatttaaatgaattaaagagtacaatcattttattcttataaaaattagctatgctatatataagaatattttatggtggttttgggacttttatttattttcatatgccttattaaaaagtattaatttattggaggattagagtgaatacattagagttgaaagacttagaaattaaagatgattttacaataatagaggataaaaaatttgaaattgtcttcacaaatgcagaaaaaggaagaagttttaatagaaatacagaagagggagttagagaattaaattcattaaaaaaagaatttaatgcagatgatataatatatataaagcaaattcatagtgatagaatattaaaatatgaaagtaatgggaaagatattataaatgaagagggagatgcaataataacaaatgaaaaaaatgttattattggggtttttactgctgattgcgtaccagttatattggtggatgaagaaaaagaggttacagctgctatacacagtggatggaggggtacttttgagtctattacattaaagacaatagataaaatgaaaaatgaatttggatctgatgtaagaaatattaaggcttatataggaccacatattagaaaatgttgttatgaagtttcagaagatttaaagcagaagtttattgaaaagaaagatacaataaatgaaaaagagctatttaatggaaataatcttaatcttgaagcgtgcataatagacgatttaaggaaatctggaataaatgagtgcaatataaatagtttagatttatgcacttattgtagtagtgatattaaattacattcatacagaaaatctcagggttcctatggtagaatgttttcttttattatttcacgttaagggggaagatggaatatggctaatgaaaaaattttaattgtagatgatgaagaacatatagttgaattattacatttcaatttagttaatgctgggtatgaggttttaagtgctaataatggtattgatgcagtaaaaatagccaaagctgaaaagccgagcttgttattacttgatttaatgctgccaggtatggatggatttgatgtttgtaaggaaataaagagagattctgaaatgaaaaaaacatcaataataatgttaacagccaaaggcgaagaacttgataagatacttgggctagaacttggagctgacgattatataacaaaaccattttcagtcagggaattacttgcaagagtaaaggcagttttaagaagaacaagctcatttaatgaggcagaagatgatgtttataattcagaaaatcttaaagtagactttgaacgtcatgaggtatatgtgaatgacagaaaggttgatttaactttaaaagaatttgaacttttacaaatactaataaaaaataaaggaagaatactaaaaagggaaaccctattagataagatttggggttatgagtatataggagaaacaagaactgtagatgttcatataagatatcttagaaagaagatagaagaagatgataaaaatccgagatttatcgaaactataagaggagtaggttatagatttaacccagctgagtaaaaatgaaaaacaaaatattaacttcagttattataacagtgctatttgcactattaattgtagcatcttcttttatcacaataataaatttagagcaaattaaaaatacaaaagaacaacttagaaatataaattcactaatttctgaacttaatgatgttactgatatcagcagaaatgattatgaggaattaaaagcattaaataatacaaaaataaatagtatagacgtaaggtttactcttatagataatgatggagttgtattatatgataatgaacagaaaagtgatgaaaatcataaggacagagaagaagttaagaaagcaatggaaactggtgaaggttattcaaagagatatagcgagacgattaagtcttatttaatatattatgcaactaggcttaataataactttgtaattagaagctctgtaagtataaattctgttacaatactgctcaaagaaaatattaagtattgtttaggaatattgcttgtggttatgccattttctttatttttatcattaagactagtcaaaaaaattgttgatccagttaaagaattagaaagcgtaactttgaaaatgactcatggggactataaaataagagccaatattagtacaaatgacgagctcggaactttaggaaacagtttcaataatatggcggaacagttacaaataaagattcgtgaagttatagacaatcaaaataaaatagaatcaatattaaaaagtatggaaagcggtgttatagccgtggataattgcaatatggtaatttcaattaatccatgtgcggaatcattgcttggaattaagaaaaatattgtaggtgaatatttattagaccatataaaggattatgatataataaagtttttggaacaagatgatgtaaatgataaagaaataaaaatacgtcatccaatagaaagagattttaaaattaagaaatcagatatggtagatggaatggaaggagtaggaaaggttataacttttcaagacataactgatataaatagggtagaacttatgagaagtcagtttgttgctaatgtatctcatgaattgaagactccgttaacatctataaagggatttgctgaaactttaaaatttgttaaggatgatgaaacaagggaaaaatttttagatattatagataaagaagctgaacggttatcaaggcttataaatgatatattggtgttatctaatattgaaagcaatctagcagttgatatgcatgagtttgaaccgggatcagtgattgaagaagtgattaatataataagaaaaactgctattaataaaaatattaaattagaatttaaagataacaataatgagaagatctttggagatagagataaattccatcaactagctttgaatttaatagaaaatgcaataaaatactctaaggatacttccggaaaagtcgaagtgttaagttataatgaagataaatattattgcttaagagtaaaggataatggaataggaatacctaaggaagatatatcaagaatcttcgaacgattttatagagttgataaatcaagaaaaaaaggtggaacaggtcttggtttggcaattgtaaaacatattgttaaaatttttaacggagagatttatgttaaaagtgagcttggagtaggaacctgttttgaagtaaaaattccatatttataacagataatgcgcaaagtggtagaaactttgcgcattttttaattattatcgaaggtatgttaaattttcttaacatacctctaatataacttaacaattctctaataatagattaactaaatgggtatattataggatatgtaataagaaataatttaaccaacataatttatgtcgaatttattgatggagggaatttataatgaaaaaaagaactttaaagttagtcgtaggggctttgttagtgacagttataggaagtgcaatggttgggtgtggaagctcatcaaataaatcagaaacaggtacaaagactgaatcaagcgataaagtaagtggatctataaccctaagtggttcatcagccttacttccattaatggaacaagcgattgaaacatataataaggaaaatccagatgcagaaattagtgctcaagcaggtggatcaggtacaggtcttactcaagtgctagatggatcagtagatgtaggaaattcagatattttcgcggaagaaaaattagataaggataaagcaaatcagttagttgatcataaagttgtagcagaaggttttggtgttgcagtaagcaaatcacttggaatagataatttaacatcagctcaagtcaaagatatattctctggtaaagtaactaactggaaagaagttggaggacctgataagccaatattattagttcatagaacagcaggttctggtacaagagcaacttttgaaaaggtaattcttggtggagataagtcagcagaaaacgaatcattaggagtaactcaagattcaaatggagcagttttaagtgcgatgaaacaaaatgatggtgcaattagctatttaggtcttgcatatatgaacacacaagaagctaaggatgctataaaaatagtaaaacttgacggagttgcagctgaaaaagcaaatatagctgatggatcatataagttctggtcatggggacacatgtatactaaaggtgaagcaacaggagtggctaagagttttatagattatgttacaaacaaagttgataagtcagttctagataatttaggatttgtttcaggaagtgaaatgaaagtaaaataatttcaattaagggatgagtaaagatggaaaaaagaagttttaaagaaaggcttaaaaatgagtatttgggccaaggctttgcagggctatgtggaatattaataatagtgataacaatatcaatcatagtatttatagcttcaaaagggataagaatattcacaaaagatggatatagtgtcacagaatttttattcacaaataattggaagccaaacaaaggtggagagccttcctttggagctctcgctttcatcttagggtcaaccttagtatcagtaggtgcagtagttataagtgcacctattgctattgctttggcgatatttgtgaatgtcatatcaagtaaatttggaaaaaagataattaaaccttcattagaagtattagttggaataccttctgttgtttatggttgggttggtatttctgtgttagtaccatttataaaaggaaattttggaggaatgggattttctttaatcgcagggattttagttttatcattaatgattctaccaaccatagcgacgttatctatagatgctataagaacaatacctcaagatcacattgaggcatcatatggccttggagctacaagatggcagacgatttataggataatagttccaggtgccaaatcagggatattaacaggtgtagtacttggtattgcaagggcttttggagaagcgttagcagttcaaatggtaattggtaacacggtaaaaatacctgatagtattacttcctcaatggcaacattaacaagtataataacaatggatatggctaatactgtaggtggaacgccatggaatgatgcattatggacattagcattaattttacttgtgatttcttttatatttatagttatagtaagagtaattgagaaaaggagtgcggtataatgaatgcaaaaaaagtagataaaattgcgacagttatattttatataataagtatgttcatagtagttttacttggtgcatttattttatatattttatataaaggtggaagcatgctaaagccgtcattcctttttggtaagccaaagcttacaggagcaggaggaggaatagcaccgcagttgtttaattcgttttatatgcttgttatttctttgattataacaattcctattggtgtgggagctgggatttatttagcagagtatgctaaagaaggacctattcttaaatttataagaatgtctcttgaaacaatgtcttcacttccatctattgttattggtatgtttggattactggtttttgtcaatatggcggggtggggatattctatacttgcaggtgctttatctgtaagtatattaaatataccttcaatgactagaatttcagaaaatgcaataaatacagcgagcaaaagggttaaggaagcatctttggggcttggagcgactagatggcaaacattagcgaagcttacagttccgacagctatgggagagatattaacgggtataatactagcggcaggaagaatttttggtgaggcagcagcatttttatatactgcgggattaagttctaaaaatttaaatttcaatactataagtatgactgggaatagttcagcattttcactttttagaccagcagaaactttagctgtccatatatggaagctaaattcagaaggtgcggtggttgatgcagctcaaatagctaatggaacagcagccgtacttataatagcagttctcttatttaatgttggtgcaaggttaattggaaatagattgatgaaagcttatagtgggaagtaggagatagttatgaatattatagaaacaaaagatttatgcttatattatggtgacaataaagctcttaaagatataaatatgtccataaataaaaatgaagttacagctctcattggaccttcaggctgcggaaaatcaactttcctaagaactttaaatagaatgaatgatttaattgaaattgtaaaaatcacaggagaagtgttttttgaaggtaaggatatatataaggactatgatgatatatatttaagagaaagaatcggaatggtattccaaagaccaaatccatttccaatgtcgatttatgataacattgcgtatggacctagaatacacggcacaaaaaataagaagatcttagatgagatagtggaaaagagcttaagaggagcagcgctttgggacgagactaaagataggctaaaatcaagtgcgcttggaatgtcaggtggacaacaacaaagattatgtattgctagaacattggcagtttctccagaagtaattctgatggatgagccaacatctgcattagacccaatatcaactggaaaaatggaagaacttatggatgaactaaagaagaaatatacagttatcattgtaactcataatatgcagcaagcaggaagaatagctgataaaactgcattctttttaaatggagaagttatagagtacggaaaaacagaagacatattttataatccaagagataagagaacagaagattatattacaggtagatttggctaaaagggggcaatgataattatgacaaggggatcgcaggatgcaagagtaaaaaatataaatagagagttgttaaaaatgtctagtctagttgaaaagcaaatatatgagagtttgctaagtttaaaaaaatatgatctagaaaaggctgagcaaattattaagaatgatgatattgttgatgatatgcaaaaaatgatagaagaggaatgtatcaaatttatagcaactgaacagccgctcgcaacagatttaaggagagtatttacagcatctaaaatagtgacagatttagagagaatggcagactatgcggtagatatatgcaagataacaaagaggattgggaaaaagattagctcatttgaaaaaggttcggaagaattatgggagatggatgataaagtaagagccatgataagagcttctgtagactcatatattaatgaagatgaggaaatggcatataaggtttgtgaaaaggatgatgaaatagatgcattctataaatctttattctctactttgattaattcaataaaagtagatgaaaatctgcttcaagaaggaactcaattgctatttgcaataaaatacctagagagaataggagatcatgtaactaacatatgtgaatggactattttttcaaaaacaggttcctatgttgatttaaatgaataagatgtatgagtattataaagtgtccttaatttattgaggacatttttatcatttggtcatgaatttcttgacttaggtattatattaatgtaatatgaaaaaaataaattaaaagcataaaggaaatatatgatataataaaatgattcgtaataattaatcgaaaatttgataagaatctagttaatgattattttttatatgtaactaaggtgtaattaggtgtaaacgataaatttaagtatgaaggggcaatggaagaatgacaagaggatcacaagatgctaaagtaaaaaatataaataggcaactagtaattatggcagacttggtagagaagcaaatatatgaaagtatgctgtgcttaaagaattgtgacgtagaagtagcagataaaattattaaggctgatgataaagttgatgaattacaaaaaataattgaagaacagtgtattaaatttattgcatcagagcagcctttggcaacagatttgagaagggtattcactgtttcgaaaatagtgacagatttagaaagaatagcagattatgcagtggatatttgtaaaataacaaaaagaattggtaaaaatgttaattctcttaaaaaggtctcagaggatttatgggatatggaaagaaaagcaagatatatgataaaggcatctatagattctcacgttaatgatgatgatgaaatggcatatagaatttgcaaaaaagatgatgagatagatactatatatagatcgctgtttgcttcttttattaaagcaataaaaaaagatgaaagcttacttcaagaaggaactcaattgttatttgtaataaagtatttggaaagaataggagatcacgtaactaatatatgtgaatggacgatcttttcaaaaacaggagcttatgttgatttaaatgaatagagatatataaatgtaggaaaatgttctttttattaagaacattttttattctctaggaaattatattgttggataatctgtggataacttataagaaaggctgatttagaaggttggcttttaaaagagaataaaaaagaaaatatattcgcctgcataaaatgttcttatatgcagcatagctgccatttctgatgtgcagatttttctcacatgcgttcgaaaaggcagatgcgtaaaaaaatctccggctccacagtcgcctgcgattttgttctttcaattttttaaatatgttttaacaatatgaattgttgacttaactaagggtttaatgtaatataacaaagataagaatgttataggtagtgtaaaaaatatatgaaaaatcaatccaactaccatttaatgttaaattatgtttgctagttgcccttgacacacctaaagataaatggtcttaggcagttaaggacgggtgaatgataattttgaacatgactaatagacccgcctattgagatattttaccatttatctttgtgggcgtgtcaagggtgcgtttcaccaactgctttagatcattaggcagttattgtacagttatttagaacaaagtcttgagatagttcaataaatttgcaccatctagtaggcatgttggacattgactctaactcttcaaggattacaggagttttgccttcaagggcagaatgtggtcttagaaagttaaagtatgccacaaacatagttacaaatgcaaccgacccgttaggacttccgaagccagtagtagctctataattgcctttaaaggttcggttaagacgttcaataatttgcttcaatggcctatattcttttgaaacttcatctttattggttaagcctataacttgagtaacatcgaattttatactatggcttgcaaagaagtgctgtgcaagaagatatatagggttaccatcagttataagattaagatcttcaggtatttcttttaacttacttagaacatcatcgatggcttttacagccgtttcggtatctctatgtggtgatactctgtaagatagaataatctttttaacagcatcaaaaaagaagaaaatatagttccacttaccgttaacttttatgtaggtttcatcgccgcagaaagagtcagaaagtttataatcgtagttatctataaatggcttaactacaattgaaacggcattaacatagtttaaaattgcttgatgagatattttaatatcatgaatatctttaagcaatgcagctgtctttctggaagataaaccgtagttaacgtagtaagttagaatgagtcctaaggtgtaagaagaaatcataatgtttggaagagaaacctttgattttaccggactttctttagaaagtggcttaaagtcaaaagtgaaatctctaaatatgtatctaactttgaacttaccaggattcttcttaaaatcttgtttttcagattttgtcattgatttaagattattttggtaaaaagagcaattatcattcttacacttataaacgtagaaatccttacgcgccttgattctttcaagtgttttactgcagtgaggacatcttaacactatggatttctgatagtaatttttaggattgaatgtggtatcacagactttgcaaagatattgtcctcggcctccgttattatcgtaaagataggtatgtggagcaccacacttaggacagataacatccttaggagctaacgctttgtttttgcgaggtttcacaggagcaaattctttgccgtgcttaaactcatattcagctattagaagcttatagttaagtttttcgggaacatcaaagattggttgatcatctacttgaagctttcggtattctttcttaacaggttcgtccgaaatgcttttaagcaagtttttgccaaccagcaaagtcatgagatactttataatttcaataagataaattacagtttcaagaagaaacttattaatcatggtaatagcttgcctccttttttagttcagtgtttttgttttgcaagtataaaatatcttaactttttgggggtggcaagttatttatataaaaaataagaaaaattaaagggttgctgccttagttagataaaaaactttgacagtaccatgttataggtagtgtaaaaaatatatgaaaaatcaatccaactaccatttaatgttaaattatgtttgctagttgcccttgacacacctaaagataaatggtcttaggcagttaaggacgggtgaatgataattttgaacatgactaatagacccgcctattgagatattttaccatttatctttgtgggcgtgtcaagggtgcgtttcaccaactgctttagatcattaggcagttattgtacagttattgaggacaaagtcttgagataattcaatgaatttgcaccatctagtaggcatgttggacattgactctaactcttcaaggattacaggagttttgccttcaagggcagaatgtggtcttaaaaagttaaagtatgcaacaaacatagttacaaatgcaaccgacccgttaggacttccgaagccagtagtagctctataattgcctttaaaggttcggttaagacgttcaataatttgcttcaatggcctatattcttttgaaatttcatctttattggttaagcctataacttgagtaacatcgaattttatactatggcttgcaaagaagtgctgtgcaagaagatatatagggttaccatcagttataagattaagatcttcaggtatttcttttaacttacttagaacatcatcgatggcttttacagccgtttcggtatctctatgtggtgatactctgtaagatagaataatctttttaacagcatcaaaaaagaagaaaatatagttccacttaccgttaacttttatgtaggtttcatcgccgcagaaagagtcagaaagtttataatcgtagttatctataaatggcttaactacaattgaaacggcattaacatagtttaaaattgcttgatgagatattttaatatcatgaatatctttaagcaatgcagctgtctttctggaagataaaccatagttaacgtagtaagttagaataagtcctaaggtgtaagaagaaatcataatgtttggaagagaaacctttgattttaccggactttctttagaaagtggcttaaagtcaaaagtgaaatctctaaatatgtatctaactttgaacttaccaggattcttcttaaaatcttgtttttcagattttgtcattgatttaagattattttggtaaaaagagcaattatcattcttacacttataaacgtagaaatccttacgcgccttgattctttcaagtgttttactgcagtgaggacatcttaacactatggatttctgatagtaatttttaggattgaatgtggtatcacagactttgcaaagatattgtcctcggcctccgttattatcgtaaagataggtatgtggagcaccacacttaggacagataacatccttaggagctaacgctttgtttttgcgaggtttcacaggagcaaattctttgccgtgcttaaactcatattcagctattagaagcttatagttaagtttttcgggaacatcaaagattggttgatcatctacttgaagctttcggtattctttcttaacaggttcgtccgaaatgcttttaagcaagtttttgccaaccagcaaagtcatgagatactttataatttcaataagataaattacagtttcaagaagaaacttattaatcatggtaatagcttgcctccttttttagttcagtgtttttgttttgcaagtataaaatatcttaactttttgggggtggcaagttatttatataaaaaataagaaaaattaaagggttgctgccttagttagataaaaaactttgacagtaccatgttataataaggggtgaaaaaatgaaaaatattataacaaaagtaacctctaatggaattgcagaggaagtcgggatagaagaaaatgatatattattatctattaatgataagaaaataaatgatattatagattataagtttttgtctgcggatgaggaaattgtgttagagatagaaaaacctagtggtgagatatgggaaattgaaattgaaaaagagtatggtgaagacataggaatagaatttggcggaggcatcatggataaggcaaaatcatgcagtaataaatgtatattttgttttattgatcagctgcctaagggaatgagagaaacattatactttaaagatgatgattcaagattgtcatttttacaaggaaatttcgtgacattaacaaatatgaaagatgaggacattgataggataataaaatatcatataagtccaattaatatttctgtacatacaactaatccagatctaagggttgaaatgctaaataacagatttgcaggcaatgttcttgaaagaatgcaaagactagctgatgcaggtattacaatgaatgcacaaatagtttgtgttccaggaataaataatggagatgaacttaaaaggacaattgaagacttatataaactttatccagaagtttcagatgtagcagtagttcccataggtattactaagtttaggcaaggacttaagcatgttaatacgtatacaaaagaacaatctattgaagaaatcaataatattaaggaattacaagatatatatattaaagaaactggcaagccatttgtaagattatctgatgaattttatttagtagcaggtaaagagattccgaatgaggaattttatgatgattatcatcaaatagaagatggtataggaatggttagatgttttagggaggcaatagatagcactttagacgatttaagttcaaatatgaaaggaagcttttcaattgttacaggagcgttggcttataatgagttgttagaagctagcaataaaataaaggaaagaaatcctaatatacagcttgatgtttataagataataaataattattttggagaaacaattactgtagcaggacttttaactggaactgatataataaatcagatgaagggaataataaatactaagtatttaataatgtctaataacatgtttagaaaaggctatgaattatctgattcaaatgagcagataatgctggatgatattaaaattaaagatattgaatcagctttagatgttaaggtgatagtagtcgactatacaggtgaagatttaatagaaaaacttaatgaggcatgtgaagaaaaataaaatagcgtgatagcttgttatttttgagtatgtctagatataaagaggaggaattttaatgggtaaaccgatagttgccatagttggaagaccaaatgttggaaaatcaactttgtttaatagattggcaggaaaaagaatttcaatagtacaggatacaccaggagttacaagagacagagtgtatgcagaagcagagtggttaaattataattttacgatgatagatacaggtggtattgagccagaaaataatgatattattataaaacaaatgagaagacaagcgaatattgcaattgagacagctgatgtaatagtatttatagtcgacggtaaagaaggattaacagctgcagataatgaagtggctactatgcttagaaagagcaaaaaaccagtagttttagttgttaataaagttgacaatttaaaagatgaaaataatgcttatgaattctataatttaggaataggtgatcctataacaatatcagcaggtcaaggattaggtcttggtgatatgcttgatgaagtagttaagcattttgataaatctatttatgatgaagaagaggatgaatatattagaatagcaatgattggtaagcctaatgtaggtaaatcttctttaattaataagttattaggtgaagaaagagtaatagtctctgatgtacctggtactacaagagatgcaatagatagttacttagaaacagaagaaggtaaatttatattaatagatacagctggtcttagaagaaagagcaaggtaaaagaagaaattgaaagatacagtgttgtaagaacttatgcagcaattgaaagagcagatgtatgtatacttatgattgacgcaacagaaggaattacagaacaagatgaaaaaataataggttatgctcatgaattgagaaaagctattatggttattgttaataagtgggatttggttgaaaaggatgataaaactttagataattttaaaaaggatctacaatcaaatttaaagttcttaagttatgctgaatacctatttatctctgcattaacaggtcaaagaactaataaagtacttaagttagcaagatattgttatgataactacaataagagaatttcaacgggtatattaaatgaggtcataagcaaggctgtacttatgaaggaaccacctattgttggaattaagagaatgaaaatttactatgcgactcaagttgcaactaaaccgcctaaatttgtattctttataaatgatgaaagtgcaagacacttctcatatgaaagatatttagaaaatcaattgagagatagttttgatttcaaaggaactggaatacaaattgaatacagacaaagaaaggaatagttatgagtaaaattacttttttaggaggaggaagctttggaagtgccttagctgttttacttgcagaaaaaaataatgttgttaatatatacgatagagataagaatgttgttaatgaaataaacattaagagaacaaacgaaaagtatatgaaagattttgcaattcctaaaggagtaactgcatttaatagtattgaagaagcaatagatggtgctgattatatagttttatcagtaccttcccatgtaattagaagtatgtgtatagctattaaagggaaaattcctagagatattccaataatatctattgcaaaaggtattgaggaagatacagataaaagattatcagttgtaattgaggaagaattagataatccagttgtagttttatcaggaccaagccatgctgaagaagttgtaatgaagataccaactacaatagttagcacatctaaagaaatgaaatttgcaactgatattcaagatttatttatgacaccatattttagagtctatactaatgacgatataataggagtagaagttggtggcgctgtgaagaatgtaattgcgttagctgcaggagttatagatggtcttgggtatggagacaatacaaaagctgcacttttaactagggggatgaaggaaatctctagagttgggatagcacttggtggaagagcggaaactttttacggattaaccggtatgggagatttaatagttacttgtacatctgtgcattctagaaatagaagagccggtttactgataggtaaaggtatgtctcttgaagatgccttaaaagaagtgggaatggttgttgaaggagtaaaagcttgtagagccttttatcaactgaaggaaagaataggtatatcaatgcctataacagatggactctataaaggattatttgaaggaaagaatgctaagtctattattgatgaactcatgaatagagacaaaaagagtgaattattttaatatttatagcattgaaattataagtatactttaggaatttatattcaagttatttgcaccagctatacaaaaaagattaattttttgtatagctggttttgtattttcaaatgttagtaaattatagtttgattaaatccctccgtaggtttgaacatgttgactactatttttttattcttttttgattatgcctaattctgatatatagttttaaagataggaattttaatatgattttaatcatatatttagtgattagaattgtattaaaattttttatttattatatttgtatattttaaataaaggatgaatatatatatattggaaaaaagaatatgggagggaaaaatgtggacaattttaacatatacaaagatatagccgatagaacccaaggggacatatatgtaggagtcgtaggaccagttaggacagggaaatctacatttatcaaaaagttcatggatcttatggtaatacctaaaattgataatacttataaaaaggaaagagcaaaagacgagttaccacagagtggctcaggaaaaaatattcacacaacagaacctaaatttgtacctaatgaagcagtagaaataaatttaggggatgaaataaaatttaaagtaaggatggttgactgcgtaggatatattgtaaaaggagcattaggatatctagatggtgaagaaactaaaatggttcatacaccatggtatgattacgaaataccttttgaggatgcagcagaaattgggacaagaaaagttataaaagaccattcaacaataggtttagtaattacaactgatggaagtataactggaatagatagaaatgactatgtagaaccagaagaaagagtaatatatgaattacagtcactaaataaaccatttattgtagttcttaatactaataagcctaattctcaagaaactaaggcattgaaaaaagaattagaagataaatataatgtaactgttcaagttatggatgtttataatatggaagaacaagatattgaggatttatttaaacacgtacttaaggaattccctgtaaaagaaataaatattgatatgcctgaatggttagaaaaattagaatgtaaccattggctaaaaaagattttttcaacataattatgaacatgagtcaagatgtctctaaggtaagagacataaaatactgcttaaatgattttgaaaatgaagactttatgggaaaagcaactataaatgaagttgatttaggcagtggaacagcaaaaatatctatgaaacctaaggatggaattttctataaggttcttagtgagatatgtaatttagaagttggttcagaaagtgacttgctcagcataataaatgacctaagtcatgcaaaatgtgaatatgataaggttaaagatgcattggaagatgtaagagagagtggctatggattggttgcaccacaactttcagaaatgaagtttgaggaacctgaaatagttaaacaaggtaataaatatggagttaaattaaaggcaagtgctccaagcttacatcttataaagtgtgatattaaaactgagataagccctataatgggatcagaaaaggaatctgaagaactagtaaaaggtcttctagaacaatttgaaacagatccagctcttctttggcaaagtaatatgtttggaaaatctttagaagtgttagtaaaagaaggattacaaaacaagctatataaaatgccggaagatgttcaagttaagattcaaaaaactttgcagaaaattattaatgaaggtaatggtggattaatctgtataatactttaaaaaaatctgatataaagatttttataatttaatcctaacaaagtgttgattttatattgtagttaagtaaattagttatattagtgatactacatattaggcataatcaagagaataacgagtgcatatgccaaacctattttcaagtacatggggaggctcggctcgctgcaatccatgagcaagtgattcacacttaatcataggttttggttctcagctcacggaggcagagaaccaaataggctagatataagagagatctgcttccatgcctaatgaaaataattatggtattttggactcgtttttctcgtatatgccttatgtattgtgaagtgataaaatcaacactttttttaccatgattttttatttaagtggtggaaaaatacatactactgggatataataaaagaaaggatataaatgaggggtattatgaaaagagagtataaagcttataagaaagttggtaaaattaaaatctctataagtgagctcttagagcttgatttacctagaatagtttatgcctctccaggtgttgtaaaccatataaaaaaaagacatggtaggcaattcacaaaaaaaatcaaggataatataatagatactatagaaaaagtgattaaagatccacaatatgttggtgtaaattataagagatcagttggtgactctcttgaattagttaaaaagattgataatattatcttacttttaggattggaagttgatttagaagatcaatatatatatgtcgcaactatgtatccaataacattgtcaaaaatgaatgctagaatatataggggaagattaataaaagttgaagatagtgaattaaaagaaaatatattataattaattttgaaataaattttgttttttgaggtgagaaaaggctcctcacgcgctagtcttagtaatcagagatgcaggatacgccgacctgccaaaaaataaattatattagagagattacttaacaatggtttaataaatagttgttaagtaatcttttgctatttatatagataacccaactaagacctgaacttatgcatataactcgccgaaatgaataatatacttttgttccagttacgaagaaaattccacctttaacttgtcactaatttttagtaagtatatgaatttaaagatttatcaaatttgcaaatataaatgttaacaatttgtgaacagaatgttgacatagaaatttattatgattatacttagttaagcaaactccaaattgtttaaaagttaaaaggaggtgtacagttgataagaagtatgactagctttggaagagctcaaagcgaagatggaagaaagtcaagtttctctatagagatgaagagcgtaaatcatagatatttagatataaatataagaatgcctagaacgatgttagctttagaagagaagataagaaagataattagtaaaagattaaatagaggtaaagttgatgtttttattaactataaagcctatggaaatagcgttggaaaagcaaatctaaatatgaagttagctgaagagtattataagtgtttaaaacagatccaaagtgaattgaacgttattgatgatatatctacaactaaaatagctaaatttcctgatgttattacattggaagagttggatgatgatttagatgatatttttagtgagatatcgcctctgattgaatcggctctagatttaatgaatgatatgagatgcaaagagggcgaaaaattaaaagttgatattttatcaaaaattgagattatagagaattacgttgaagaaatagaaaaggtagctgacagtatccctaagaattacaagaagaaacttgaagaaagattggaagaattattatctggtgttgatatagatgaaagcaggatagcattagaagtggctattctttcagataaggcagcagtagatgaagaaataacaagactcagaagtcatttagaccaaatgaaaagtaccttagatttagatgaacctattggaagaaaattagatttcataattcaagaaatgaatagagaagctaatactatagcatctaaatcaacagaaataaatatgactaacaaagtaatagagataaaaaataccattgaaaaaataagagaacaagttcaaaacattgaataattaggaggtaaaaaatgggaataaagttaataaacataggctttgggaatatagtctctgctaatagattagttgcaattgtgagtcctgaatcagcacctattaaaagaattattcaagaagcaagagatagaggtatgctaatagatgctacttacggaagaagaactagagctgtaataataacagatagcgatcatgtcatcttatcagcagttcaacctgaaacagtagctcatagattatctacaaaagatgatatggcagttgatgaggatgatgaataatgattactaaagggagaggtctattaatagttatatcaggaccgtctggtgctggaaaaggtactatatgtaaaagatttatggagaaaaataaggatgtaatgttgtctgtatcagctactacaagatctccaagagctggagaagtagaaggtattaattacttttttatgtccaaagagcagtttgtagaaaagatagaaagtaatgatttcttagaatatgcagaagtgtatgataattactatggtacacctaaatctaacgttgaagaaatgttacaaaatgggaaagatgttattctagaaatagatatacaaggtgcattaaaagttaaagaaaacacaagagaaggagtttttgtatttattcttccaccatctatggaagagttaaaacaaagaatcattaacaggggcagtgaaactcaagaatctctaatgaagagatttaaatcagcgtataaggaaattaattttatttctaaatataattatgctgtagtaaatgataaagtagagatagctgtagaaaaattagaagctataatatctgctgaaaaatgcagagtagatagaataaaagatagtatattagattcaaaggagggaattattcatgaacaactctatgattagtccatcagtagtagacttattagaaaaggtgcatgacagatattctttagtaattttaacatcaaaaagagctagacaaataatagaaggtgcagaacctcagatttcaataaaatcaaataaacctttaacaattgcaataaatgaagtagatcaagatgcagttgaatttgaaattttagaagaaggtcttaaataaaatgaaaaagaatttagtgttgggtgtaagtggtggaattgcagtatataaggcattagaaatagtaagtttacttgttaaaaaagatattaatgttaatgtaattatgacagaatcagctactaaatttgtgaccccattatcatttcaatctttaagtcagaatatggttacatgcgatatgtttgcagaaccgaaagcttgggagattcaacatataagcttagcagaaaaagcagatgtattcttaatagcgcctgctacagctaatataataggtaaagttgcaaatggaatagcagatgatatgctttcgactacaataatggcaactaaggcaaaagtgatttttgcacctgcaatgaataccaatatgtatgagaatcctatagtccaagaaaacattaagaaattaaagtcacttggatatgaatttatagacccagctgaaggaagacttgcttgtggaacgagcggtaaaggtaaacttgaaagtcctgaaattattgttgacaaagttttaatggaattaaatgaaaataaagatttgctaaataaaaatgttgtagtaacagcaggtccaactatagcacctgtagatcctgtgagatttattacaaatagatcaactggaaaaatgggttatgctatagcaaaggaagcacgaaatagaggagccaatgtaacattaatatctggaccaacatcaataatagctccaaaagatattaacgttgtagaggtttctaccaatgaagaaatgaaaaatgaagttatgaacatatttgatgaagcagatatagtaataaagtcagctgcagttgcagattataagcctaaaaattatagcacacagaaaataaaaaaaggtgatggagagctttgcatagaatttattagagataatgatattctaatggagcttggaagcaaaaagaaaaatcaaattctagtaggatttgcggctgaaagccaagagttaaaagacaatgctatgtcaaaactacaaagaaaaaatttagattatattgtagcaaacgatataacagcaagtgatactgggtttgcctcagaagataataaagtaataatcttgtctaaagaaggtaaggaaatttacttagataagatgagcaaagaaaaaattgcaactaacttatttgatattatacttgagaagcgctagaatttgcgcttcttttattaatattggaaatacttatacatatgatacgcaaatgaaggcagatgtataagtatgaaatagttttgattattagtttttacgtaataatcagaaggttaattatctaatattgaatattgttaatataagattagatgtgaggtgataggtataaatatcatgtatgctgaaataattataaatagtgatgctttggaaattgataagccatttacatacaaagtacctagcgaacttcaggataaaataggaataggatttagagttaaagtaccttttggacctaaaagcaggccaatagaaggctttgtattttcaatattgcaggaagatgatttaattaatttcaattatagagtgaaagagattttaaatatatgtgatgattatgctatattaacaaactatgatatggaagtaattaaatttttaagaagaaagtatttatgtaaatttattgatgcaattcgccttatgattcctgttggaattatgaaggggctaagggaaaaaaagaaaaaagtagttttagtaaatgaagaaatacaagcggatcagctggataaagaaaattacaaaaaattatatgatttcatagctagcaacaatgggatttatacaaaaacagaaattgttagtaatggatgcttctctttatacttattaaataagttaatagaaaaaggtatactaaggacagaagaacaaacagtatttaggtataacactagaatatatgacactgatagtaataagaaacttacaagagaacaagaaaattgtcttaatacaattttaagcagtcctgatcaaaaatatctaataaaaggtgttacggggtcggggaagacagaagtatatataagactagttgaagaaatgttaagtcaaaataagagtacaattgttttagttccggaaatttcattaacccctcagatgattgaacgatttaaaggccgatttggagaaaatgttgcactttttcatagcaggttaagtgatggtgaaagatttgatgagtggtatagagtaaaagaagggaaagctaaattagttataggagcacgaagtgccttgtttttaccgcttcaggatcttggacttattataattgatgaagaacatgaaaatacatataaatcagaacataatcctaaatatcatactagagaagtaagtgagttcatatgcgaaattaagggctgtaaattagttatggggtcagcaactcctagcgttgaaagttattataaagctatccgaggtgaatataagttaatagaaatgcataaaaggactaatggaaaagaaatgccgcatatggaaatagtggatatgagggaagagctgaaaagtaagaatttatcattgttcagtagaaaacttttagctgaaatagaggcaactttaaaaaataagaagcaggtaattttgtttttaaacagaagagggtattcaacatttatttcgtgtagaagttgtggatatgtatttaaatgtccagaatgcgatgtttctatgacataccataaaaatggatatttgatatgccattactgcggaagggcagagaaatcaaaaactgtatgtccaaaatgtaatagtaaatatgtgaaattttttggagcaggaacagaacgtgttgaactagaagtgaaaaaatattttccgaaatcgagagtattgagaatggatgttgacactacacggcataaaaattctcatgaatcaatttataattgttttaaaaatggagaagcagacattttaattgggacacaaatggtgtcgaaaggattagattttaaaaatgttacactggttggagttttagcggcagacatgtctctgaatttgcctgattacagagcttctgaaagaacatatcaaataataacgcaggttgcgggcaggtctggaagaggtgaagatgaaggcaaggtaatagttcaaagctatacgccaaaccactatagtttaaagtgtgctcaagaagaggattatgaatctctatttaaagaagaaataaagattagaaggttgatggaaaatcctccttttggtaaaatattattaattgttggatcttcgaaatttgaagaaaaattaacaaaatttatgtatactttagaggctgatttgaaaaaattagtagtagatgatcttactattctcggaccagttccttgtataatttctaaattaaaagaaaactacagatggcagataataataaaaggaaattttgatgatgagtttagtgaaaaagttaaagatacactttatctattaaataagagtgtatataatgaaataagggttagtatagatattaatcctaataatatgacatagggggaatacaaaatggcattaagaaatataagaaaatatggtgatgacgtactaagaaagaaatgcagagaagttgataaaatagatgctagactattgacattaattgaagatatgaaagaaacaatgtatgacgctgacggcgttggtcttgcagctcctcaagttgggatattaaagagattatttgttgtagatattggagatggaccactagtatttattaatccagaaataatagaaacaagtgggtctcaaatagatgaagaaggatgccttagtttaccaggagaaacagaagaagttatgaggcctaattacgttagagcgagagctttaaatgaaaagggagaagaattcgaaatagaagctgaagagttacttgcaagagctatattacatgaatatgaccatttaaatggaactttatttatagatagagttaaaggtagaggggcttcaaaaaaataaatactgataggaggataatataatgaatatagtatttatgggtactcctgattttgcagttccttctttgcaaagaatgattaaagagtacaatgttactgctattttgactcaaccagacaaaccaaagggtaggggaaagaaaatggcgtactctgcagttaaagaagaaggattaaaacatgaaatcccaatataccagccaataaagttaaaagatgatagagatttgatagagaaattaaaagagctcaaaccagattttattatagtagtggcatttgggcagattttaactaaggaagtattagatataccaaagtatggatgtataaatcttcatgcatctttgcttccaatgtatagaggtgctgcaccactaaattgggcaataataaatggagagaagatttctgggaataccacaatgcttatggatgttggtttagatacaggagatatgattcttaaggatgaagttgaaattcctaataatatgacaactggtgaattacatgatatattaatggttagaggagcagacttacttgtaaaaagtatagagggaatttctaaaggagatatagttccagaaaagcaaggaaatgagactttttatgccaagatgcttgataagaacatcgctaatatagattggaataaaagtgctgaagagattcataacttagttagaggactaaatccatggccaattgcttacactgattataagaacgaaagaatgaagatatatgaaacagaagttctaagagaaaaaagcaacaaagaacctggtactattatagatgtaagcaaaaatggagtgaaagtttcatgtaatgaagatgttcttttaataaaaagagtacagtttcctaatggtaagcctttgacaatagaacaatatattaatggacatgaaatagaggaaaatataattttacaataatggagttgatgtataatgcatttttatccgttttttgatccaacaatgatactattagttccggctataataatttcattttgggctcaatccaaaattaatagtgcgtatagtaagtatagccaagtaagaacaataaatggatatactggtcaacaagttgcaagaatgatgttagatgaagctgggctgtttgatgttagaatagaattgataaattcaaaacttggagatcattacgatcctacaagtaaaatccttagactatctccggaggtatattcaggtgcatctatttcttcagcaggtatagctgcccatgaggttgggcatgcattgcagcataaagaaaggtatgctccactagtaataagaaattctattgtgccagttgtaaatattggctcaaatgtatcatggatgctattctttgttggtatattattaggttttaagggattaactacacttggaataattctattttcaggagttgtaatttttcagctaataacattacctgtagagtttgatgcatctaccagagctttgaatatattaaagtctagaggaatattatatggtgacgaaactaaaagtgcacaaaaggttttagacgcagcagcaatgacatatgtagctgcaacgttaatggcagtatcacagttaataagattaattgctataagcaatagaagaaatgattagtaaagaggtagcgtatgaattgtagaaaattagcagtaaagatattaggaagagtcttaaatgaaggggcttactctaatatagtattagcaaaagagttaaatgaagcagaattaagtgataaagataaagcactattgactgaaattgtctatggagttttaagaaggaaaaaaacattagatattataatttcaaactttgtaaaagaccttaagttaatgaataaagatatcttaaatattttaagagtagcaatatatcaaatgaactttttggataagatacctagctatgctgcttgtaatgaagcagtagaggaatctaaagaaatatcagaaaatgattcaaagttagtaaatggaatacttagaaatttcactaaaaatcctgatgatattgaagttctaggaaataaaattgatgaatatgcatataagttttcatttgaaccttggatgataagacttttaataaaacaatatggtgaaaatgtatcaaagaaaataatgtctggattaaattcaatcccacaagtaagtgttagagtaaatgaacttaaagcagattatgatgaagtctttgaaaaattagaagaacttgaatatgaagttgaagaaggcgctatttgcccagaagcaatttgcataaaaggtggtaaatctatagaaaataatccgctattccaagaaggaaaaatcacagttcaagatgaaagtgcaatgattatagcaccattattagaattggaagaaggaatgacagttacagatttgtgtagtgcacctggtggtaaaactactcatattgctgaaatacttcaaaacactggaaaagtattagcgtatgatcttcatgaatctaaacttggattaataaaagaaaattgtgagagattaggtataactaacgttgaagttaatacaagtgatgcaactaaattaaacccagatttaatagcatctagtgatagaatcttaatagatgttccttgttcagggcttggaataataagaaaaaaaccggaaataaagtggaacaagacaagaaatgaattaagagaaattataaaaattcaaagagatataatggaatgtgcatggatgtatttaaaagaggatggaataatgatatattcaacttgtacattaaataaagaagaaaatgaagaaaatattgagtggtttgttagcagacataaagactgtagcgtgaaaaagatctttattggtaaacaagataacttagtatacaatagagatggttctctaactattatgccaaatgaaaatatggatggattctttgtggctaaattagaaaaaagacaatagtaggtgaataaatgaacaatttgctagattttactttggaagaacttaaagcatggatgaaggaaaatggtgaaagtgcatttagaggtcaacaaatattatcatggatttataaaggtgttaaagaattcgatgatatgagaaatataccaaagccattagtacacaaactaaaagaaaatttttttgtaggtttgccaaagatagtagaagtatataaatctaatatagatggtacagaaaaattcttattaggatttaaggatggaaacttaatagaatctgtactaatgagatataagcatggaaattccatatgcatatccactcaagttggatgtgcgatgggatgcaaattttgcgcatctacaattgaaggtaaagttagaaatcttacaactggagaaattttatcgcaaattatggttgttcaagattatatcaatgaaaggatttctaacgtcgtattaatgggaagtggtgaaccacttgataattatgataatgttatgaagtttctaaaaatagtttctgccgaatatggattaaatattgggcagagacatataacattatctacttgtggaattgtacctaagatatacgaattagcagataaagaacttagtataactctagctatatcgttacatgcatttagtaatgataagagaaaagagattatgcctatagctaataggtatagtattgaggaagtattagaagcttgcagatattatataagcaaaactaataggagaattacgtttgagtatgcactagtgaaagacgtaaatgatggcagagaagatgcaaaagcattaggcaaattgttaaaaggtatgctttgtcatgttaatttgataccagtaaatgaaataaaggaaaatacatataagagatcttcaaaaaaggcgatagaagatttttcggaaatactaaaaaatcacggaatagaagttactacaagacgtgaaatgggaagtgacattaatgcagcatgtggacaacttagaagaagttacataaatacccaagaaatagagggggagcaaaatggtaggtttagttagtgatgttgggttaaggcggacattaaatgaagactctgcttcgtatttagaaagagacgaattcaagatttatgtagtggcagatggaatgggtggacataatgcaggagaagtggccagccagatggctgcaacgaatattgttgattacgtaaaagaaaacttttcttctagtaaagcagaaaatttacttgtagaagctatagagaaagtaaataaagatatatttactttctctaacactagcgaaaatttaagtggaatgggaactactgttacaacttgttttatgactaaaaattttatacaggttgcaaatgtaggtgatagttgttgttttgcagttaaaaacaatgaaattaaaaagattactaaagatcattctttagtacaagaactagttgatattgggagtataagtgaaaaagaggcggaaaatcatcctaagaaaaatattattacaagagcattaggaactagcattaatgtgaatgtagatatatttcagttagagaacagagaatatgacctttatatattgtgttcagatggattgacaaatgaattaactaaagaagagattctacaagtcgtcactgaaggagaaagttatgtaaacattgctaataaacttgtatacttggcaaagcaaaacggtggcagagataatataacagtattgttgtttggaggagagatgtagcatggatggaattgtacttggaaacagatacgagttgttagaaaaaataggggaaggcggaatgtcagaagtatttaaggcaagagacaataaattaaataggtttgttgcagttaaaatacttaagaaagaactttgcgacaaccctgatattgtagaaaaatttaaaggtgaggcaacagctgttgcagccttatctgacaataatatagtaaatatactagatgtaggaacacaggatgaaataaattatattgtaatggaatatgttaaaggaaaaacattaaaagatattataaaacaagttggaaagatgaattatgaaacagctatatcagttgcaattcaaatagccaaagctttagattgtgctcatagaaacaatataatacatagagatgttaagccacaaaatattttagtaacagaagatggagttatgaaagtaactgattttggaatagcaaaatcatcaaattctgaaactattacaaatactagtacaataatgggatctgctcattatctttctccagaacaagcaaaaggaaattttattgattgtagaacggatttatattcattaggagttgtattatatgaaatggttactggaaatctcccattccaagcagatactgctgtaactatagctttaaaacatcttcaggaagaggttgttccgccaaaaagtgttaattcaaaaattcctgagagtttaaatcaattaattttaaaagcaatggaaaaggaccctattaagagatatcagaatgctaaggaaatgatctcagatctccaaagaataaaggatgaccctaatgcaaagatagataaagaagacgacaatgatcatacgataataatgtctgccgtaactgaacagatatcaaagcaagaggaaaagttgcccaataaaaaagatgatgactatgatgatgaagacgatgatgattattactacgaagatgatgaagatgaaaaaggcagtggaataaacaagaagagaataatgaaaataacaataggtgtagttttagcattactattaatagttttaggtgttgcagcttttaaaatggttagttctgctactgctaacagtaaagaagttcaggttcctgacatagtaggaaagaatgtggatgatgggaagaaagcacttgaagttttaaatttagttttagtagaaggtggaactgaagcaagcgatcagccagaaggaactattcttaagatgaatccagatgctggaactaaagttaaagaaaaaagtcagattagagtcattgtaagtggaggagcaacaaaacttaagatgcctgatttaaaggagtatgatatagatactgcaactactattttaaaatcctttggacttaagattagtgataaaagcgaagcttttagcgatagtataccagaaggacaaataataagtcaaactccgaaaaaagatactgaagtaacagcagatgataagataacagtcgttgtaagtaaaggaccggaagttaagactacaaaagtacctagtgtagtgggtaaagaccaagatacagctacaggtgaattacaagatgctggtttaaaagtatctgtaaattcccaagaaacacaagatgaaagccaaaatggtaaagttttaaaacaaacaggagaaggaaatagagtagagcagggtactacaattgttataacagttggtaaatatgttgcaaaacaagatccgcctgtaactaataatcctcctcaaggaaatactaagccaggtggaaatggaagtactcctgataaaaacactggaggaacaggtggtactactactgatacaccaggaaagactcctaatactccaggtacaactaatcctacaggcccatgggatgatacaaataacagccaaaacaacactcaaactaaaacatcaaatcaaaaccatcaataataaggtaaggagaggttgataaaaacctctccttctatgatatatatgttgcaattcacaatgcatatttcacaattcacaattatggctaaaattcttaaaatatttttagaattatgatgaagaattatttttgcaatatatatttgtatttagacctacattaaatctctaaaaagaaaatatactatgatagaaaatactaatttagaaatttaatatattttgcaattaagttgttaagttctagtcgggtttaggcacttggtttattaaaatcttaaacttacatttatctgattaattattgcagcatatattaacattctatagaagaatatataaatttattttataagttatggagggaaattatgaatggaaaaataataaagggcataggaggcttttattatattaagacagatgaaggcttaatagaatgtaaagctagaggaaaatttagacataaggacataaagcctatggtaggggatgatgttacaattaagatggaacatggaaaaggagttattgaagagatacataagagaaaatctcaattggttagacccactgtggcaaatgtttctttagcatttgttgtttttgcagttaagaatccagacataaattttgatttattaaataagtttttgattctatgtgaatataataacattgaggttatagtttgcttgaataagatagatttagtatcggaagaggaaagagaagaaataaagaagcgaataaatgtcataggttatgaggttctctttataaatgctaaaaaaggaataggaatagagcggttagaagaaaagattagaggaaatataacagttttttgtggaccatcaggagcaggaaagtcaacattaataaataagctttccaacaaagaacatatggaaacaggtaatgtcagcgagaagcttggaagaggtaagcatactacaaggcatagtgaattaattgaggtagcggacggatatatcgttgatacccctggattttctacactagaaataaaggatttaatggataaaaattctttaaaatattgttttcctgaatttacacagtataatgataagtgtaaatatagaggctgtttacattataaagaaccaaattgtgctctaaaagaggctgtagaaagcgaaaagattaatagatacagatatgaattttatgtaagagcattagaagaaataattgaggaggaaaaaaataaatggtaaagattgcaccatcaatattatcagcggatttttcaaagttaggagaggacatagaaagaatagataaaggaggagcagattttattcatatagatgtaatggatggatcttttgttcctaatatatcttttggtttaccagttataaaatctattagaaatagaacaaagaaggtatttgacgttcatttaatgataaataatccatcaaattacatagatgcttttatagaggctggggctgatataattacaattcatcatgaggcagataaacatatagatagaacaattaattatattaagtcaaaaggaaaaaaagcagcggtttctttaaatccaggaactccaacaagtgtattgaaagatttaataccaagtttagatatggtcttgataatgtctgttaatccgggatttggaggacaaaaatttataccttattctttagataagattagagagataaaagcacttagcgatagattgaacccagagcttttaatagaagttgatggtggtattgataagacaaatgttaaagaggttatagaagcaggtgcaaatgtcattgttgcaggttcagcagtatttaatggtggggaaattgatgagaatataaaagctctaagggggtaataatttgaacgttgcaattgtaagtggaggaaacccaccttcagagaagttactaaagaaatatattagtgaagttgaatttataatagcagctgataagggaagtgaatgtctttataagtataatattattccagacctgcttttaggtgattttgactctgccaaaaaggaaattttggatagtatgaagttaaaggttaaggaagtcttagaatttcaaccagagaaagattatactgatactgaaattgcagttatggaagcgataaaaagaggcgcagaaaagatatatttatttggggcgactggaactagaatggatcatacactaggaaatataggacttatgctaactacgaaaaaaaaaggtgctaatttagaaatattagatgataataataggctttatcttggagaaaataaaatgaggttatacggaaaatatggtgaaaatatatcatttcatgcattgagcgataaagtaagcaaacttgaaattagtggtggtaagtacaatctaccaagttatgatttgggcttgttagatccacgagctatatgtaatgaatttattgatacaccaatagatataacttatgaagaaggggagttattagttattcattccatagactaaatattcatgaacttattaaattattttttatatttaaaagtggaacattttgagtagtaactgaatattaatataataagacggattaaattttgatttttatttttaatgtattaatatttgggaggatttataaatgaaaataatagcttttaaattacctaagtttctatctaatataataaagttttttagaaaaaaaggctagaggtacataaggtatagtttagttttaggctttctaaatagctttaggcataatcaaaaataataacaagtccatctgccaagaaaagttccttgttgcagcatagctgctcttttcataagcgcccattttccatcatgcttcatcaacagattgcactaataggctcgctatgagcccaatctgcttcttcgcctgatgaaaaataatcatggcattttaggctcgttattttctttaatatgccttaaaaataaaaaatgcaattgggataacaattgcattttttattatgaacttatattgctctttgaacctttccagatctaaggcatcttgtacatacatgaacagtttttggtgttccgttaactaaagcttttactttctttatgttaggagcccaagttctctttgattgacgatgtgaatggctatagcttactccagctacaacacccttatcacaaatttcgcatcttcttgccattagaaaacacctccttatattccaaagataatcatcttcaataggacagagtaaattatatcataggaaaatgtaataggcaagataaattattaattataaaataaaaaatatgtattgcagctaatatagggctttacaatgggagtgaagcttatgtgaatacctgccgaaatttgatatatattatgttgcaattcacaatgcacatttcacaatttacaattacggctaaaattcttgcaatatttttagaattatgatgaagaattatttttgcaatatatatatttatttcataggtaaattattctcatgattatgttttaaaaactttttggaaggaaagactttgtagagatagatttttaaagaagagaaaaacttttagctttggttttaaagctcttaattgtaattggcactagtttttttgtacatgaatgttttatttaaaggtaaaaagatctttgaagatgagtgatgttgatttgattgcttttctgagagatgataatggttatactacacgtttttaagaaagaaaatagtatggttgtactttgtgttttctaaatggagaattatcttaagtgaacttaatgcttttttctggggaaaagatcttgattgcagttagtaagtattgaattgcgatctacacttttttcatatgtatgtttttttataaatttatgatctaggttgcagtttgtgctttttcatagggggaaatgatttggttgtactttattttttcaaaagcgagaagcatcttaattggatttgaatctttttttctggggaaggaagcttgattgtagttaataagttccgaattatgttttacactcttttcatatttgggtgcttttttttagggaaaatgatcttggttgcgcttcgcgcttttttcagatgtgtatattttttggatacttgaataaaatattgttctaatatagaatagaaaataagatataagaatttaggaggaatatggatggttggattttcaaacgaaaatggtaatataaattattcagaggaagttatagcaaaaattgttggattatccacaatggaatgttatggagtagttggaatggtttctagaaatgccagtgaaggcttttgggaacttattggcatggaaaattttggtaaaggtgtaaagatacagctaacaagcgagaaaaaattacaaatagaattgtttgtgatggttgaatacggaacaaagatatcggttatatctaataatataattcaaaaagtacgttatagtgttgaaaactatacaggacttaaggtgtcatctataacagtaaatgtgcaagcggttagagtttaggaggttaaactaaatggaatatacaaagataaatggccatgatttttataacatggttgtgaacgctagcaataaattgctagagcagagtgatttcgtaaatgcacttaacgtatttcctgttccagatggagatactggaactaatatgtctatgacgtttaaggcggcagttaaggaaatagaaggtatggatacttattctataggagaaatatcaaaaaaattagctaaaggtgctttaatgggagccagggggaattctggcgttatattatcgcaaattcttagaggtttttctaaaggcctagaaggaaaaaaagaagtagatattaaagagtttgcagtagcgttttcagaaggatcaaagtcggcatataaggcggtaatgagacctactgaaggtactatactttctgtaattagagccgctgctgaagcggcagtgtcatctgatgctaaggatatggttgcctttatggaagagataacagttaaatcaaaagaaatgttagatagaactccagaattattaccggcactaaaaaaggctaaagtggttgattctggtggaatggggctttatattatacttcgaggtatgtttgaagcattgaaaaataatattaaagctgaattaagcgatatgaaaataagtgatgcaaatggtactttagctaaagctacagaggaaattgatataaagtttgggtattgtactgaatttataatacttggtgacgctaaacgtgcacaagatttccaaaatgagatagagagccttggagattccatgatagttgttggatatgatgatgttataaaagtgcacatacatactaatgatcctggattagtcttatcaaaggcagttgctataggggaattatcaaagataaagattgataatatgagagaagagcacagagagctattaataaatactaaggaattaacagaaacttcatctgaagatgaagttggtgatggtgaaaagaaaaagtatggatttataacagttgctatgggagatggaatttcaaatatctttaaggacttggggatagactatgtcattgaaggtggccagacaatgaatccatctactcaggatattttagatgctgttgagaaaataaatgctgaacatattttcattatgccgaacaataagaatataattatggcagctaatcaggcggcagaaatatcaagtaaaaatatattagtagtacctacaacaactattcctcaaggaatagcatgtgccacaatgtttaactatgattctgaagttgaagaaaatttcactaatttaaaggatacaattgaagtagttaaaaccggttcggtgacatacgcagtccgtgatacagaaattgatggaatagatattaaacaaggaaatatgttaggacttgtagaaggtaaaataaaagaggtaggcgaagacaagaaggttgttgccggtaaagttctagaagatatgatagatgatgaaagtgaacttattactgtatattatggtgaagatgtaagtgatgaagatgcaaatgaatttgaagctgagctacaagaaaagtacgaagacttagatattcaattttataaaggaaatcaaccactatattactttttaatatcagtagaataagaaatagtaagggcacctaatgctaggtgctcttattatttaaggaggaagagaagggctttggatatatatagcaatatttcaacattaaaaggagtaggcccaaaggccacagaaaaattaaatagatgtggaatttttaatatactagacattctgttatattttccaagagattatgaatttgtagatagtaatgtggaatttgaaaatattacaggagaagacaagcagattttaaagtgtaaagtcattagatttagaagcgatgtaaaaactaaaactggtaaattattaacaactgtagaatttgattataatggacacaaagtatctggaaagtggtttaatcaaaggtatataaaaaactcctttaaaataggagaaatatataatttgatggggaaatttaaaaggataggaaatactttagaggtggttaatcctatggtcacatgtgaagaagctatttcgaatgagattatacctaaatatcctctaaaaggtgatataagcaataagttgtttgaaaaattaattaatgaaattttgtccaagatgacagttaaggagaatttgccacaaaatatattagataagtattctttaatttcattaaatgaagctattagaagcgtccattttcctgataataaggaagtgctggaaaaggctataataagacttaaattccaggaattatttacatattcactaaagttactacttcttaaaaataaaattaagaaaaacaaaaatggtatactttttcagtgggtagatgaacttagcttatttaaagagaagttaccatttcctcttactaatgctcaaacaagagttatacgtgaaatattgagagatcaaaaatcaaattcatcgatgaatagacttatacaaggagatgttggtagtggaaagacaataattgcacttatagctatttttaatgtgatcaaaaatggttatcaatgtgcatttatggctccaacagagattcttgcaaatcaacactttgaagaggcgagaaaagtttatgatgaatttaatatagaaattgaattactaacaggaacaacttcagcaaaagaaaagcagagaatcaaagaaagaattaaaactaaagaaccaattttagtgataggaactcatgcacttttccaagatgatgtggaatttggaaagttagggcttatagtgaccgatgagcagcataggtttggtgttgagcaaaggagtaaacttataaacaagggaaaaagggctgattgtttagttatgacagcgactccaattccaagaacattggcactatacttatattcagatcttgatgtatctataattgatgagctaccacctggaagaaagaaaatagatactagattttatgctgataatcaaagagatatagcttatgatttggcatacgatgaaataaaaaaaggtcgccaagtgtatattgtatgtcctcttattgaggaggatgaaaaagaggagttaaattcggtagaaactttgtatgataaacttaccagtggaatctttaaggaattaaaagttgagatacttcatggaaaaatgaaaggctctgaaaaagatgaaataataaaaaggttcaagaataatgaagttaacgttctaatatcaacaactgttattgaagtaggtgttaatgttcctaatgcatctgtaatgattgttgaaaatgcagaaagatttggactgtcacagttacatcaattaagaggaagagttggaagaggtcagtattcatcttattgtatattaatagcaaaggctaaaagtaatgtgactaaaaaaaggatgcagataatgacagaatgtagtgatgggtttttaatatcagaaaaagatttagaactcagaggcgcaggagagatgtttggtaggaagcaaagtggtgatgaaggattcgtacttgcaaatctttacgatgatatgaagattttaagatgtgctaaattagaggcgaataacattttacaaaacgaatttgaggtaaatagagaaataatcaatgaacttagtaaaaatttggaaaaaagtagtaaatatatatgctttaattaatttgaaatattatgtatagatatgttaatatataaaatatacacctataaaaagagcgcgaagcgcaattaggatcatttcacctataaaaagagcgcgaagcgcaattaggatcatttcacctataaaaagagcgcgaagcgcaattaggatcatttcaccgatgaaaagagtgtgaagcgcaaccaagatcatttcattgatgaaaagagcacgaggtgtacaactaaggttaattttaaattgtaaattaaaaaatctagagagtagattttcttatatgcttattttaggaggaataaaaatttgagaataatagcaggaaaagcaagaggacataaattaatacctccagctacaatggaaacaagacctacgctagatagagttaaagaggctatgtttagttctattcaaatgtatataccagaagcagtagttgtagacgtttttgctggaacaggaagccttggattggaagcagcgagcagaggggcaagtgaagtttatttatttgataaaagctctgtgacttttcctttgttgaaggaaaatgtagaaagcctcaaatttcaagatttctgttttcctatgaatatagatgcttatgaaggcttaaagaatcttgcgaagaagggaaagaaatttgacataatatttattgatccaccttattgcaaagaaatgattccagaagccatgaaaattgttaaggataatgaaattttaaaaaatgatggaataatagttactaaaatagataccattgaagaaatttatgaagggtataaagatataaaattaacaaaaagtaagaagtatggaaatacaacagtatgttattacaagcatgaggagaagtaaataatgagagttgcagtgtaccctggaagctttgatcccataactaatggacatctcgatattataaaaagaggagcaaaggtttttgataaagtaatagttgcagtattagttaatgttgataagaagtatctttttgaaagcagcgaaagagttgaacttataaaaagagtgacaagagatattgggaatgttgaaataagaagctttgatgggcttttggttaattttctaaaagaatgtaagactaatataatattaaaaggattaagaacggcttctgattttgagtatgaatttcaaatggcgtttattaataaagaattagatcatgatactgaaactgtatgtatgatgtcatcgtctaaaaatatacatattagttcctcaactgttaagcaggtggcaaggtttgggggagatattagcgggcttgttcccaatgaaattatttcagatataatgtccagaataaatctataaatgatcattttctaaggaaaagtattttcataattagaatgtgctatgtttaagcagctgcattaacttaaaattaacgctattaataatgctaaaagcaattagaagtactagatgaagatttgttcatggtattttgctcatttatagaataaatatctaaggagtgtttttatggaaaaaatggaggtaaatataatagaattattagagtatttacaagacttggtggaaaattcacctaaagtaccaatgagcggtaaagtaatgatagataaaagagaagttgttgatgtaatagatcaaataattaactatatgcctgatcaatttaaaaaggctgagtgggttatgaatgagagagaaagaattcttaatgaagctaaaaaagagtatgattctgttagaaaagaaacaatgactatgatgagacagaatatcgagaatcacgatatagtaagggaagccaaaggaagagctcaagaaattatagcctcagcacagagagaggccaaggctataagattaggatctagagattattctgatgaaatattaacgcaattagatcaagagctagaagaacacaaaataaaattaataaaaagtcttcaagaaagttttgaggtagtagctaaagagatagatacaaatttaactggtacatgcgatgttataaaagaaaacattaaagaattacgcagcatgaaaaaataatttcaaggttctattaaatatacttagcaaaagtgttaataacagtatagttaatgcaggatatatatacacaaataaacttgaagaatggctcatttgtaagtttgatgtataaatacttgtaggaaacactttgcataacccataagttataataaaactaacgattccttggattacttttaaaaagatatatctactataatttatcttagtatcgcttacgaaagaacttacttgtgcgattacagcaagaccagaaaatgaagttaaaaagcttattataccaagcttcaaggggatagaaatttctagaggagagattatactgcacccattagtcatttcaatgcttcctaaaaatatactgtataaagtttgggaaggcagttttaaaatattatctagctgcctaaatgcaatgttgatataaggattatttttaacgagagatataacaaccgaaaaaattattatgaaaccacctatagataatgtagtgtttattccgttttgaactgcattttttacagcattaccgaaattcatattttcatttttaggacaagggagagaacttatattatttaagtttctcttttttttcgttaaaaatccgattatgattattgataaattgcttcctagaagcaaaatataacctaatgatacatttcctaataaagttccagcaacagatccgattaaaaacaagggtccaacgttagaagctatgtttaaaagcctttcgtattcatttctgtctatatactccatcttgtacaaatctacacaatatttagcacctaatggatagccgcatagtatactcgctacaattggaaaggaacaatttctagaaagacctaatggtttgcaaattaatggtccaagaaatttagaataaagatttattccatcgtagtatattagtaaattacatataaccacaaaaggaaaggtagttggcaatattgagttataccataatttacacccatcaatagctgcaatgatgcattggtttatgtttaaaacaaaaagaactattaagacagatataaatatacaaatgatagtattttttttaatattaagttgtttgattaaaataaaaattaagctaataataagaaaccataagacaataatatatatcatgaaatcactccaatcaataatatttatattcttatggttatgtaaaatattactacattataaaaggaccttttaaatagtcatccatagggtttacttttggatttagcagcgaatatgcttttgttcctaagatatctatttttagatgatcacattgattgtttcttggtacttttgttattaaatttatactagaattggtttttatactctttagaattctttgtcctgtagaattaaaagcaagaactcttgcgtaaggaacagggctcttagataagtttaataaatcaaaatcttcaaggtttaaaaagctttgcaaaagaattctacttatcctggtatacgtatatctcttgcttttagaatttaatattaattcattaagtgaattggatcttaagatttcttttaatattttattgtctatgccttctgatacatctggcagatttgaaagagatctttcgttagtaagtaatttatattttatatatttaaatgtatcttcttcaaaaataaaagggtacttagaagaagatagatcaagaagaatgtcatagctcgcctttggtataatgtcagttaaatcattcagagatttctctttcaaatgttttcttattgatgtagcggaagcgaatgaagcacttatgttgatatcattatataatgaaccttctcttttaatagttttaggaactattgagctatttaaacgaattagagattttatatattcaatacctaaaatattattagaatttgatattgtatctaataatttatttgagtttaaataatctttaagtgcatttgctcgactcaaatgaaatggtaaacccaagtctaaattatcctttaaaagttttttgtatcttaaaggttcagaaactaaaacttttgctatgtcttctaatatagagacatttccttcttcacttccgaagtataagtgatctattacacctaaggaattaagaagagacacacttccaaaagcaaaatgttcagcagaagaaatggaataaactagaggaagctctagaactagatcaacgccgtttttaatagccatttcagctcttctccatttatctataattgctggaattcctcgctgcataaaattaccactcattacgcaaactataccatctgcgtttgtgtcagattttgctttactaaggtgatattcatgacctttatgaaatggattatattcggtaattattcctgtaagtattaaaatcatctcctttataaagctagtatagcatattgtggaatcttataatattagttattaagagtttaatacgttatatattcttcttaaaatgtcaataagatattataaaattattgttaaaaaatatacttttttaatattactctattaaaaagtagtttaaaaaatattcagaacattaaaagaatggtgaatttttaattattgtttaatattgacaagagaatagcttatatacagctagttaaacgaatatactatggatttttaagaaaaattgaatgaaaataatgggaaatggacatgtatttttcatatattgggtcaataatttaaaacatttgatagcgtttaataataaattataaaataattttaaataaaatttaattgttaaaaattatacttttcctatattgttattttacaggagtattgtctgacaatttagattatttcaaatctaaagacttctattttatagagaatttgtgttgaaaaaagcactgataaaggagtatattagtattagagataggatatagagaggagataaacagattatggaccttatgaaaaaaatatggattgcagcacaatcaaataaacaaaaaattgttcttccagagggaaacgaggaaagaaatatagcagctgcagaaaaaatacaagaattaggattagcatacccaattttaataggtaacaaagaagaaataaataataaggcaaaggaattagatgtaaatttatcaggaattgaaattatcgatccaaatgaatcagataaattaacaaagtatattgaagccttctatgaacttagaaagaaaaaaggcgttacaatggaaaaggcagataaaatagtcagagatcctctatattttggtacgatgatggttaaattagatgatgcagatggaatggtatcaggagcaattcacacaactggagatttattaagaccaggactacaaatcataaagacagcaccaggagtatctgttgtttcaagcttctttataatgcaagttcctggatcatcttatggtgaagaaggaacattaatattctcagactgtgcagttaaccctaatcctaacgaggatcaattagcagcaattgcaatagctactgcagaaacagctaagagtttatgtaacatggaacctaaggtagcaatgttatcattctctactatgggaagtgctgataatgagttagttgataaggttagaaatgctactcaaaaagcaaaggaaatgagacctgacttagatatagatggtgagctacaattagatgcagctatagttggaaaagtagcagctcaaaaggcaccagaaagtactgttgctggaaaagctaatgttttagtattcccagatttacaagctggaaatataggttataaattagttcaaagatttgcaaatgctgaagctattggacctatctgtcaaggttttgcaaaaccaatcaatgacttatcaagaggttgtagctcagatgatattgtaaatgttgttgcgcttacagcagttcaagctcaaacaaacaaatagtaagtattatttttacagataatttaaagtaatttagcttatagattgttaaaacaaaaatacaaaaggtttgaatgttaaaaggagagtagagttatgaaagtattagttataaattgtggtagttcttcactaaaatatcaacttattgatatgagtaatgaagagtctttggctcaaggacttgttgaaagaataggaattactgggtcaatattgactcaaaaagttgaaggaaaagataaatatgtagttgaaacaccattaaaagatcatcaagatgcaatagaacttgttttaaaatgcttagttgatgaaaaccatggtgtaataagttcaatggatgagatatcagctgttggacatagagttgttcatggtggtgaaaaatacgcaacttcagtagtaattaatgaagaagtaattaaggcacttgatgaatttacaaaattagcaccacttcataatcctccaaatataattggaataaatgcatgtaaggctcttatgccaaaaactccaatggtagcagtatttgatacagcattccatcaaactatgccagaaaaagcatttatgtatgctcttccatatgaattatacacagaagatcacgtgagaagatatggattccatggtacatctcataagtatgtagcaggtgaaatggcaaaatggatggataaagacataagcgatttaaagataataacttgtcatataggtaatggtgtaagtattacagctgttgatggtggaaaatctgtagatactacaatgggattcactccattagatggtattataatgggatcaagatctggaagcatagatccagcaatagttacttatttagtaaaagaaaaaggatattctatagatgaagtaaatgatatcttaaataagaaatcaggggttctaggtatatcaggaataggaacagactttagagatattagaagtgctgtggaaaatgataatgatcctagagcagtacttacaatggacatattcggatatcaagttaagaagcaaataggtgcttatgctgccgtaatgggtggtgttgatgcaattgtatttacagcaggaataggagaacatgctccagaaataagatcaagagctttaactaatatggaattcttaggaatagaagtagatttagaaaagaatgaaagtcataacatcggagatggtatggaaatttcaaaggaaacttcaaaggtaaaagtagttgtaatacctacaaacgaagaattaatgattgctaaagaaactttagaattagttaagtaaggcataattgaaaaaatagtaagttaacatgctgattgatttttatttataatttatcagcatgttttttcaatggctttatacaatatatttggctgtacttcctttatagaagaaaatatatacgtaaaggggagcagttagtatagatacaaaaacatttgtatcatgagtttgttattttctttcatatggagaaataggaatttataataaatttcttgactttttagcacgcaatttatataattagttgtgtttgttttataaatatatgtgctaaggagtgaaagaggagatattatatagtttacattagtttattatatgattatcctgtgattttatgaaagtacaaatttcagatattatttcaggtaaagatagaagcaagaaaattgactatatatttgatgcaccgcaatttgattttgaaggagatataattaaacctataaaaccttttgaagttgttgggaagattgcatcagatggtgatatattaatattgaatgctaaaatcaaaactgatttagaaatgatatgttcaagatgtttagatacctttatctatccaatagatattgatatagaagaaaggtttacaactaatagagatagtggtgatgatgaagctattgttgtaatggatgatgttttagacatcacagaaattgtcgaaagtagcataatttcaacactacctattaaaagagtttgcaagaacgactgtaaggggctttgtcaagaatgtggatgtaacttaaatcacaattcatgttcatgccagaaagaagatgtagatatacgttttgaggccttgaaaggtttgtttgataataaggaggtgtaatgaatgggttgtccagcaagaaaatcaggaaaagctaaagtaaaagcaagaagagctcaaacttttaaagctagtttacctggcatagttgaatgtccacaatgccacgaaatgaaacttgctcatagagtatgtaaaaattgtggttattataaaggtaaggaagttgtagcttctgaaaaataaaagaaagtctttatgactttcttttcttatataaagaaatatatacatgttgcgctattaaatttatacttaaaacttcttagcgaaattttcatagttctgagaaataacgatgtttctactttgggtttattaccacataagtataagttgaataatctttatctaaaaaagagaatattctatttattaattaaattaatttatttataattaaagtggaagaagggaggtattcagatgaaaatagctatagatggcatggggggagacaatgcacctgtggcagtaatagaaggctctattcaagctcttaaggcatataatgatatccaattgtatattaccggtccagaagaagttctaaatctagagttagctaaatatacttatcccaaggaaaaagttattatagtagatgcaaaggaagtaatttcacctaatgagcatccagttatggctctacgaaagaagaaagattcaagtatagttaaggcactaaacttagttaaagaaggaatttgtgatgctgtagtatcaggaggcagtacgggtgcatttttagctgggtgtacgttgatagtaggcagagttaaaggaatagaaaggcctgctcttgcgcctataatgccgggtagacgtggaaagtttatgatagtagatgttggtgctaatgttgattgcaaaccttcatttttagtgcaatttgcaaagatgggaaaaatatattatcaaaaggttttcagtgttaaaaatccgactataggacttataaatattggagaagaagaagaaaaaggaaatgaacttacaaaagctgcttttaagcttttgaaggaagagagttctataaattttaaagggaatatagagcctagagaaatacctactggcgacactaatattttagtaagtgatggttttgtgggaaatacagctttaaagatgtatgaagggtccgcttcgagtatattaggtataattaaagatgaggtgcttaaatcgtcgattatatctaaaataggagtagttctactaaaacctgtgctaaaaaatataatgaaaaagtttgattataaggaatatggtggagctccgttcttaggagttgatggaatttgtataaaagctcatggcagttctgacgcaagagcatttaagaattctattaaacaaactaaaattttctatgataataatgtattaaaagatataagaaatgaattttcttcggaaaattagttaaaatatattgaaactaatattgacgatttaaacaatatataatattatctaaatgtagaacttgggaggtgaaacaaatgtttgaaaagatccaagcaattattgctgataaattaagtatcgatgtagaaagcgttgttatggaagcatcatttattgaagatttaaatgcggactcattagatatagttgagcttataatggctctagaagatgaactagatatggaaatacctgacgaagacgttgaaaacttcaaaacagttggagatgttgtcaattacgtaaaagctcatcacgaagaataaaataatcccgcatcttgcgggattttatattttacaaagtgagaactaaatttaaaatcattttaaaatagattttagtgagaaatgtactttagtaatatatttgcgtacaaatgttactgtctatgataacgatgtttttagttggaatttaggaaagaaaatcaatatagtaactaaaatatcaaattaatagtttattcttgaatttgttatgtgtgacatacagtaataagttagcaagttgaagaataaacttcaaggagtggaatacatgaatagatatacacttaaagaaatagaagaaaatttaggggtgttttttaataaccacacattactaaaaacggctcttactcatagctcttttggaaatcaatttaaggatgcggaatacaatgaaagacttgaatttctaggggactcagtattgcagctttgtattacagaatacctttttaataattacaaacataaaacagaaggtgagctgacaaaaataagaagcttgatagtttgtgaaaattctctttacgaaattgcaaaaaagataaatctaggatcttacattagaatgagtaaaggtgaagaaattacaggtggaagagaaaggatttcaatacaagcagatgctgttgaggcaatcattgccgctgtttatttagacaaaggcattggttttgtaagagattttatattgcttcattttgaagagataataaataaagcaataaataatgaaatagtattagatttcaaaacaaaacttcaagaacttcttcaaaaagatggagaagtagtaattcaatatgagcttacgaaatttgaaggaccacctcacagaagaaaattttttacaaatgtagttatagataaaaaattaatgggtgaaggttcaggctatagtaaaaaagaagcagaacaaaatgcagctaaacaggcattagatatattggaaggtaaccatgagtaaaaattattatataataccgatatttgtacctcacgaaggatgtccgcataattgcgtattctgtaatcaggatagaataacaggtgttgatgatgaagaggttacggcaagttcagtaattaccacaataaatgattatttaaaaactataaagaataaaaatgcaactattgaaatttcattttttggtggtacatttacagggattagggaagaaaaacaaagagaactcttaaaagtggctaaggagtttaagggaaaaggtctcatagataaaataagactttctacaagacctgattacatcaatgattatatactcacatatcttaaagagtatggagttgacataatagaacttggagttcaatcactaaatgaggaagtgttaaaaaaagctggcagaggacatagcgttaatgatgttataaatgcatctaaattaataaaagactataaatttatattagggcatcaaataatgcctggactgccgggagatacttttgaaagagatatagaaacgactagagaatcaattaagatgaatccggatatttgtagaatatatccgtctttagttataaaagatactccaatggaaagaatgtatattaataacgagtacattccatattctcttgaagaggctgttaatgtaagcaaggttatgtatgatatgtataaaaagcataacattaacgtaataagaattggtcttcagccgacagaaagcataaatgaaggaaaagatatagtggcaggtccatttcatccgtcgtttagagaattggtcgaaggtagtttattgtcagatatcattttagaaaatatggcggaagaaaaaaatggagttctatatattaattcaaaggatttaagtaagctttacgctaataagaaaacatatttcaataagcttaaagataatggtaaaattattgatgtaaaacaaaatgatgatattgaaagaggtcatataaaactttgtttaaaaaatagagatttagatatagaatactagcgaggggagactctcgcttttaataatgcagattattggtgacaaattaaaacttgaaagtgataagttaaaagcttgaaagttaattagtgacaaattaaggcggaaattttcttgagaagatctttaataaagaataaaaagcctgggctttttaccttaatttactacttatcatttttcacttgtaacttagaaatcttacggcatttttattagtgaattattgatatttaataagctttactataaactaaattataataaggagttgtttaatatgaaaaaaaagaccagagaaaaaatgatgattgcaatgactatttttattatagtaatctttgttgtaacattattacctagtatattttctttttaaggagaggacacatgtttttaaaatctctagaaatacgaggatttaaatcttttgctgataaaacagaattaaaatttaaacaaggggttacagcggttgtaggacctaatggaagtggaaagagtaatatttcggatgcggtaagatgggttttgggagagcagagcgttaaggttctaagaggcggaaaaatggaagatgtaatatttgcaggaacgcagtttagaaagccagtaggccttgctcaggtttccctaactcttgataatagtgatgaaaagctcgcgacagaatataacgaggtagttgtatcaagaagaatatttagatcaggagaatcagaatatttaataaataattcaaagtgcaggctaaaagacgtaataaatctttttatggatacaggaattggtaaggaaggttattcactaattggacaaggtaagattgaagctatattaagtggtaagccagaagatagaagaaatctcttagaggaagcagcaggtattgtaaagtttaaaaacagaaaagaagaagcagagaaaaagttaagcaatacagatgaaaatttagttagaataaatgatattctgtcaacttacgaagagagaatagaaccattaaggattgaaagagagaaggcattagaatttaccgacttatctaataatttgaagaaaaaagaagtatcacttatagtacataccatagacaaaatggaagaagaattaaaagggttcaatgaagatttaaatttgaaaattaaagaaattgaagataagcgaaaagaagtatctagttataagtcacaacttaaagaactagagatgaaaatagaaaagctagaaaagaagaatttagaagaaaaagagaaatattatagcttaaaagaaactgttagtgaagatgaaaaaagtatagaactttataaagaaagaattaagagttttgaagaaaagatcaataggaataattatgagctggaagatattttagttaaggtgaatcagcttgatgaaaacaagaaattattagaaagcgaattgagtgaaagactaaaggagcaaagattaagagaagaagatatagtaagtttagaagaaaacaatataaaaagttctaaagaacttaaaagtatagatgaagaaataaaatctctaagagaaggtgaatttgaacttttaagaagtaactcagatatgaagaatgagattactatgctaaataaagatctttcgctaagagaagagaaaaaagaaactctaaattcgtctatatcttttctagaaaataatattgttattaatttagcgacttataaagatctaaccaatgaaattgaaaagaataaagacaatataaaattgttaaatatgcaaatagtagagcataagaaaaaaataggttctctatcagcaaatttaactaaaaaagaaaatgaacttagagaattaagtgggactttaacaaaacttgatgcaaatagatcaatgttagaaaacttggaaaagcattatgagggatataacaggtcagtaaaatctttaatggaattaattcatagggaaagaattacggctgcaaatgatactaaagtcttaggtgaaattttcactgtaggtaaaaagtatgaagttgctatagaaatagctttaggtgctgcaatttcaaatgttataacaaaaaatgaagaaatagcaaaagttcttataggatatttgaaaaaaaatagtctaggaagagcgacatttttacctttaaatattataaaaggaaagaagttagaactagatagaagtataactgaagctaatggatatattgggattgcaagtgacataatatcttatgacaaagagtataaaaatataatggattattctctaggaagaacaataatctgtagtgatatggactgcgctcttaacatcgcaagaatcggaaaatataattatagaatcgttactttggatggagaaatcataaatccagggggagcattaacaggtggtagcataaaggggaaaaattcaaatgttctaggtagaaaaagagagattgaagaattagtattagatataagcaataaaaaagagaaatatgaggaattgaaaatactagttcaagatatcaagaaagaaatacaaaacctagacgaggatatgctgaataaaagggatgaagttcatgagaaaaatattgaacttacaaaaaaggaaagtgagattaaagggttacaatctgacacggacaagctaaagagaaatctagaaactgctaaagaagaaataaaaagaatagcaggtgaaagagaagctattttagaaaagattagagctaaagaatctgaagttcaggtgattgaaagtgaaaatacagctaacaagagcaaaagtatagaactggaacaattaatgaaaattaaagttcaagaagttaacgatagcgatactaagcttacagaaatgaaaatcagtaaggctaagttggatgaggcaatagaaaataaaaagaatgaatttttaagaatagaaaaagaaattaaggatttagagattaaaaatgaacttttaaataatgaaaatgaggaaaataaaaaaaatattgaaagtttaaatttagatataaaggctaagaataagaatatcgaagaaaataatattaatatcagcaatttagaagcaaactttaaagatgatgagatattaaaagaaaagttaaagcaagaatttaaagaaaaagataatgtaataagcggaattttggatgaagtaagcttaaaagaaatggaagttaataagcgagaagtaattaaagctaagaaagaaaatgatagggagcatgtttataagaaacttaatgaagagttagaattaacttatgcagaggcattagataaatgtgagccagtagttgatgaggaagccttgaaacaagaaatttttgttactaaaggaaagataacaaaacttggagtagtaaatttagcagcaatagaagagtatgaagaaattaaagaaaagtatgagtttatgtctactcaggcagaagatttagaaaatgccaaaagggaattaaatgctgttattgaagaaatgactaatgaaatgaaaagtctatttaaagagaacttcaaaatattaaattataattttgataaaacctttaaagatttgtttaaaggtggaagcgcggagcttattttaggtgaaggtgatgagcttacagccaatattgacataaatgtagagccgccaggaaaaaaacttcaaaatattaatctgatgtctggtggagagaaggttctatctgcaatagctttactttttgcaattttaaagatgaaaccaactcctttctgtatattagatgaaatagaagcggctttagatgatgcaaatgtatatagatatgcagaattcttaaaaatattctctcaaaatactcaatttataattataactcatagaaagggaaccatggaggtaagtgatattatatatggggtaacgatggaagagaaaggtgtatcaaaggtagtttcagtagacttatctgatagctagcgtacgtaaacttcctacttctagtgagaggtaacggctgcacgcttctagattagttcaactaagatttgagataagataacttatctcaaatcaaatttcacttgagcagaaaattttaattaggaggaaattaatttgtttggaaatttatttaataaactaaaagagggattagcaaagacaagagatggattaactgataagataaatgaggccttaaatttggcggtaactatagatgaggatttatatgaggaattagaagaaatattaatcatgtctgatatcggcatggatacgactgtagatattatagaaagattaagggggaaaatcagaaaagaaaaaataaacgaccctcaagaagtaaagccggcattaaaagaagtaattagagatatattacttgaaggtgtatatgaagatgaagaaaaagaaaagaaagtaatgcttataattggggtaaatggcgttggtaagactacatctataggaaaacttgcagcaaagaataaacaagaagggaaaaaagtattactggctgcagctgatacatttagagctgctgctatcgatcagcttgaagtatggagttctagagctgaagttgatatagttaaacatcaagaaggatcagatccagctgcggttgttttcgatgcaatagaagcgtcaaaggctagaaatgttgatctattaatatgtgatacggctggaaggcttcataataaaaagaacttaatgaatgagcttgaaaagataaacagaataattgatagggaattgcaaggctatagaaaagaaacattactagttttagatgcaacaacaggtcaaaatgctgttattcaagcaaagcagttcatggaagcttgtccgatagatggaataatattaactaaattagatggaacagcaaaaggtggcgttgttttatctataaagcaaagcttaaatattcctgttagatacataggagtcggggaaggcattgatgatcttcaaaaatttgatgcagaaggatttgctgaagcattaatatagggttagataagaaataataggccagtatgtttggtctattattttctttcattgcgttaggaaattataatgaagtcaaatataccaataacttttaaaagtggcgaaatgtgcacggttttggaagtggattttcttgtgtgtcttaaaaatatttctagaaaaatatataaaaattaaactatgtttaaatgtttatatgaaaatatatttctacaaacacatttttaaaggtacataggtttatataaaaatagtttcaaagattcatatttttaaatatacatatgaaaatatgtaaatatttattggaaacatcaggggttcaaggtttttgattatgaatatacaaaatataagcaatttaaaaatcattaattgcatcaaaaaacttgagatatagagcctagatgtaaaaaaataaaagtgttaagtaaaaatacttgacactttgaaataatcctgttaaaatctcttttgtgggtaaggtgattaaatggaagatagagttgagatttcgttacttatggatttttatggtccgttattaacagaaaagcaaagtgaaattatgcagtggtattataatgatgatttatcgttagctgaaatagctgagcttaatcaaacgagtcgtcaggctattcatgatttaatcaaaagatgttataaacaacttctctcctatgaacgtaaacttaacttacttcaaaagagtataaatagaaaaaaggaaattatgaattttttagaacacttaaaaaataaatattccatagatgatgaggatattataaaatataaagaaaagctagaaaatttataaggaggagtaaacatggctttcgaaggattaggtgaaaaattacaggaaacttttagaaaattaaaaggtaaaggaaagttgactgaaaaagatataaaagaagccatgagagaagtaaagcttgccttactagaagcagatgttaactataaagttgttaaacaatttatttcttctgttagttctaaatgtgttggaagtgaagttcttgaaagtctaacaccaggacaacatgtaataaagatagttaatgaagaacttactaatcttatgggtggaactgaaagtaaacttaattacagtagttcaggacttacagttataatgttagttggattacaaggagcaggtaaaactactatgtgtggtaaacttgcgttaaaccttagaaaaaataataaaaaaccattattagtagcttgtgatatttatagaccagcagctataaagcaattagaagttgtaggaaaacaaatcgaaattccagtattttcgatgggagataaagtaaaccctgttgaaattgcaaagaatggtatagctcatgcaaaagataatggaaataatgtagttatcatagatactgcaggtagacttcacattgatgaagaattaatgcaggaactaaaaaatataaaagataatgtaaatccatcagaaatattattagtagttgatgctatgacaggtcaagatgctgttaatgttgcagaaaactttaataatgatttagatttaagtggagttattttaacaaaactagatggtgatactagaggtggagctgcactgtcaattaaaactataattgataagccaattaagtatgccggtgttggcgaaaagatgaatgattttgaagtgttccatcctgatagaatggcatcaaggattttaggaatgggtgatgtattatcgcttattgaaaaagctcaagaagccattgatgaaaaggaagcagctgatttaggtaagagaatgttaaatcaagaatttaactttgaagattatctaatggcaatggaacaaatgaaaaagcttggacctttaaataaaattatggaaatgatacctggcttgaattcaaaggaacttcaaggagttgactttgataaggggactgaggctcttgataagactaaggcgattattcaatcaatgacactaaaagaaagaagaaatccaagccttatactaaaatctccatcaagaaaaagcagaatagctaaaggatcaggtactaatatacaagaagttaataaactcatgaagggctatgaaatgatgaaaaagaacatgaagcaaatgaagtcattccagaagcaggcaaagaaaggcggcctatttggcaagttacctttctaagcattagagttaaaatatatatttattatcctttaaaggaggtgaaattaaaatggcagtaaaaatcagattaagaagaatgggtgctaagaaagctcctttctatagaataattgttgcagattcaagagcaccaagagatggtaagttcatcgatgaaattggatactataatccattaactgaaccagttgaagttaaaatcaacgaagaaaaagctaatgaatggttatctaatggagcacaaccaacagaagtagttaagagacttttcaataatgcaggtcttactaagtaatttttggaggtgaattctacagttagtacatactaattgtaggcgtttatgaaggaattagttgaatttatggctaaatcccttgttgataacccagatgcagttactgttaatgaagtagatggagaacaatccataatacttgaattaaaagttgcaccagaagatatgggtaagattataggtaagcaaggaagaattgcgaaagctataagaacagttataaaagctgcagcagttaaacagaataaacgagttatagtagaaatcatctaaaaattgagagttagggtaacctaactctttttaaatatacacattagaaaaaagcgcgcaagcgcaaccaagatcatttaattgtaaaaaagcgcattagcgcaaccaaaatcatttaactataaaaagcgcataagtgcaactgagaacattttgtctataaaaatgcgcgtcagcacaattaagattaattcgcatatgaaaaagcgcacatatatgagaagagtgtgcttaacaattcggaacttgttaagtgaaactaagatcatataggcaatctaatagctttaacaatgagttcaaggaaaaaagtatataataatttatatagggcataatcaaaaaaataatggattttagtataagatactattaaaaataacaacaagtcagcatgctggtctatttttcgtcatacgcgtctctaagttattttatgccattattcttcttatgcttaaaatgaggtgaaaagagtgggaaatttatttaaaattggtcagattataaatacacatggaattaaaggcgaagttaaagtgtatcctctaacagaagatgtaaataaatttaaacgtctaaaaactgttttagtaggtggagaggaaaaggaaatactaggagttaaattccaaaaagatagagttatactaaaaattgaaggtatagactctatgaatgatgctgaaacttataaacaaaaatatattgaaataccacgcgaaaatgagccagaacttccacctgacacatattatgtttctgatttaaaagaatgtactatatatgatactaatgaaaaagaaattggaagaattttcgatgtaataagcactcctaacaatgatgtatattggattaaggaacctaaggaactattaataccagttcttagagatatagttctagatatagatataaacttgaaaaaaatcattattaagccagtaggtgaatggcaagatgaagattagcatattaactttatttccagaaatgttttctatttttgatcatagtataataggaagagcaagagaaaacaacatagtagatttagaaacgctaaacataagagattatacgttaaacaaacataaaaaagtcgatgattatccttatgggggcggtgctggaatggttatggcacctcaggctatagttgatactataagggacgcaaagttaagtaataaagggaaggttgttttcttagggccgagaggaaaaactttcaaccaagagattgctaaagagctttctaaggaagaaggacttatatttttatgtggacattatgaaggaatagatgaaagagtttataagcatatagatatggaaatttcacttggagattttgtgctgactggcggagagatggctgcaattccggtgattgattgtatattaagattaattccaggtgttttgggaaaagaagagagttttatggaagaatcattttataatggacttttagaatatccacaatacactagaccagaagagtttgaaggagataaggtgcctgaaattctgttatctgggcatcatgaaaatataagaaaatggagaaggcttaagtctcttgaggtaacaaagaagattagacccgatttatataagaaaattacattaaccaaagaagatattaaaatattaaaaaataacaataataaataatttttgttgaaatataaaaaattatgtgataatattaagtttgtgctagtacgggcgttccgctgtcatacatatgtgttaagaacgtcaaattatcgttaaggagggaatgcacaatgaacgaaataataagagctatagaagctgaacaaatcagaactgacttacctaaatttgctatcggggatactataaaggtatacgttaagattcaagaaggtaacaaagaaagaattcaaatgttcgaaggtactgttatcaaaaaacaaaatggtggtttaagagaaactttcactgtaagaagagttgcttacggaactggagttgaaagaacattcccaatgaatgcaccaatcatcgacaaaattgaaatcgctagaaaaggtaaagttagaagagctaaactttactacttaagagatagagttggtaaggctgctaaagttaaagaattattaactagatagtatttgaaaaggggactgtttcagtcctttttttattatataagaaaaataatattaatacgtgattaatgtacaattaaagcaaggaaaagccgagggattttttaagaataggattagaaaattactaagtcattttagtataaatttcttacagggtatcctaaaggcatgaaatgtgaattgtgtattttgaactgaaaaataaatttaaggaggaattcatatggcaattaattggtttccgggacatatgaaaaaaactcaaagagaaattaaagaaaacttgaaattggtagatgctgtaattgaaataagagatgcaagaattccaagaagttctgcgaatcctgatattgaaaaattgttagagggaaaaccaagaattatacttttaaataagagtgatttaaccgatggtagagttacaaaagagtggataaattatttaactaaagatgatgttaaagtattagaggttaattgtttaaaaggtgatggacttaagaatataaagcctacattgctaacattacttaaggaaaagcatgatagattaaaggcaaaaggtatggttaacataacaatgagagtaatggttgttggaatacctaacgtaggcaaatctacatttatcaataaaatggctagaaataatatagctaaaacaggtgataggccaggagttactaagagcaaacaatggattaaaacaggaatggggattgaaatgctagataccccaggagtgttatggcctagatttgaagatgatgaaacagctttgaatttagcttttactggtgctataaaagatgaaataatggatatagaagaattagctttgaaacttgttgaaagattacaaagtaattatgaagagaaattaaaagaaagatataaacttaaagaagtttttgaaaatccattagatacattagatgctataggcaaaaaaagaggtactttaatttctggaggacaaattgactataatagaatagctgttatactacttgacgaattcaggggaggaaaaatgggcaatatcacattggagcgcccaacagaagaaaatgatacagtttaatgaagatataagatcactatcatttgcggaaattaaggaagaaatacataagttgtctatagttgatttatatagaaatggtgaacatacaaaagttataaactggctagaagaagataaaaggaaaaatgtattatcacttaagaaaaagattgagaaagatttagaatcatatttaaatgaagttaaaagagtcaaaacaatgtatgactttgataaatcatttggaagttatcggtatatagctggtgtagatgaagttggtagaggacctcttgcgggtcctatcgtagcttgtagtgttattcttgatttaaatgttttagaaaaagatttaatcttatatataaatgattcaaaaaaagtaaaagagcataaaagggaagaactttctgaaataataaaagaaaaggcattaagttaccaaatagcagtttcttctaataaagaaattgatgaaaaaggaatagcttttgcaaataataaagtgtttttagaaagttgtaatgcacttagtataaaaccagatttagtattatctgatggctatttaattaagaacattggtatagagaataaatctgttataaaaggtgatacaaaaagtgctagtattgctgcagcatcaattgtagcaaaagtgtatagagataagctgatgaaagaatatgctaagaaatacccacattatgactttgaaaataatgtcggatatggtacatcaaaacatatagaaggtctaaaaaaatacggaaaaagcgacattcatagaaatagttttttaacaaaattattgtaattaaattttgcttaagcacatgaaaatagataataagtcaaaagtgccattaatattttttatcaggcaaggaaaggcgacaaattggcatcatagcaggcctgctaggtcaatacgccaacatagtatgttgaaaaataaaattgcaaatagatttgttatttatttgaatgtgactaaatggaatttatatgaagagattagtatgttcatgataaataagttaataaaaaaactataagaatattagaaatttaaataatattcttatagtttttttgttttgtatgctgtggtagtaaatttgcattaaaaactcaagtaaactaataaattagttaagtctaaaagcatcctttatgtggtttattttaaaatttgtactttctaaatttaggtaaacttcaatgacatcaaatctaacattaatattaggtaattttttatagttaatataagaatttgcaacttttattatggacttttgttttgaaaaattaacagattctcttggcaatccataattattgctatatctactcttaacttccacaataattaataaattattctttttgcatataatatcaatttcacctaaaaagtttttgaaattacaatccaaaatattataatcattcttttctaaatatttcttagctaaatcttcgctaaaatcccctatatctttatttatttttttcattatatcacttccaattttatttactaaaatatattaaaaattactaactgcattgctattatatctttgaattattaacaattaaaaaataaatataacaaatgtgtttttatggaattaatatttaaatgtatgtctataatttttagtaggtgatttatatggcagtaaaaataattagtgcaacgcacaatggattagaaggttttttaataaaagtagaggtagatatatctaagggtttaccggtgtttaatattgtggggctcccagatgcttctgtaaaagaagcaaaagaaagagttagagccgcaatattaaactgtgggtttgaatttccgttaggaagaattactattaacttagctccagcagatgtaagaaaaattggatctcttttagatttgccaattgcaattggtatattaatggaatcaaatcaaatttgcagaaagaatttggaggagtatattatattcggagaattatccttatttggcgaacttaaaggggtaaaaggtactatacctataataattgaaggcgcaaggaaggaaattagaaaattcatctttccttatgaaaacttagaagaaagttattatttcaagaatgttgaatattacccattaaaaaatttaaaagaagtagtctcacacattacatatgaagatatgctcccttatgagatggagagcgatgaaagagaagaagaaatactagattcactagattatggggatattataggacaatattcttctaaaagagcattagagattgcggcagctggaaaacacaatataattctttatggagagccaggatgtggtaaaacaatgcttgcaaaagcattaatttcaattttaccatccttgtctcaagaggaattaatagaaattgcaaaaatatatagtgcatgcggccttatgacaaagatttctcatattagcagacctttcagagctccacatcatacaactacaagaatagccttaattggcggaggaaaagaaataaggcctggagaaataactcttgcacataatggtgtattatttttagatgaaattttggagtttaagaaggatgttcttgaatctctaagagaacctcttgaagaaaaaaatgtgaatattaataggcttagtggaagttatcaaatgcctgctgattttcttctaatcggggcttttaatccagtagaaaacaatgaggataaagatttaaatgatagcaaatattatttaaatactaaaattactaaatattctaagaaattttcaagtgctttgctagatagaattgatatattaaattatgtgcctagactcaattatgatgagatagaaaacaaaaaagattcgtacgattcaaaaattatgaaagaaaatgtacttagagctagagagatacaaaaactgagatttaagaatacggcttataaatataattcagatataaaaggaaaggacatttttgaaatttgtagggttaataagaaatgttcagagcttctaaaaaaatattataatacatcaagcgtatcgttaagaggttatgggaaggtaataaaattggcaagaactatagcggatatagataatcaaaaggatattttagagtttcatattctagaagcttttagctataggaaaaatattaatggagaaattatgtaggtttagaagggaatatgtataaatggattatgaattatggttaatacttattgatattacaagttttcaaaaaataaaattaataaataaatataaaacagcagaaaatgtatataataattttgaggagatattaaaagaaaatgaaacaatatctaaaaaattaaaaaattttcaaaaagatgatttatgctatgaagttttaaaattagaagaaacattatataaaaaaaatataggatatataacatactctaatcctttatataaagagaaattgagcgggattttaaattctccttatttccttttttatatgggaaatatagacattataaataataaatctataggtgtagtaggggcaagaaaatgctcaaattatggactaactgtaacaaaactcttgacaaaggagcttattactaataatataacgcttataagcggaggtgcaagaggaattgattcgattgcacataaaacagctttagagaatgatggatataacatatgcgtattaggatgtggaatagatagagcttatccatctgaaaataaaatgttgttttctaaaatagcagaaaaaggcgtagtaatttcagaatttttacttggtacagcaccattaagagaaaattttcctaaaaggaatagaataattagtggtcttagtgagggtgtaatagttatagaagcttcagaaaaaagcggatctttaataacagctagacttgcgcagcagcaggagaaaaaagttattgctgttccaggctctatattatatgctggagcaagtggttctaacaaactaattagagatggtgctagtatatgtactgatatagaggatttaagagttttacttagtttagaacatattgaaattcaaccgatgaattttacaccagagaaaagtgaaatactagagttaattacagattcaccaattcacatagatgatatttttaaaaatacgtctgttgatagaggagctttatacgcattattatttgaaatgcaaataaaaagtgaaattatttgtctaccgggaaattactatgtgaaaacaatttaaaaatgtgtagggggtgaatacttcataaattttatggagttatactatgggtcaaaaacttgtaattgttgagtcgccggctaaagcaaaaacaatcggcaaatatttgggtaagaattatattgtagaagcatcaatgggacacgtaagagatttacctaagagtacattaggtgttgatatagaaaataactatactcctaagtatataactattagaggaaaaggagaattaatagataaactaagaaaggctgcaaaaaaagcagaaaaggtttatctcgcaaccgaccctgatagagaaggtgaagcgatttcgtggcatttagccaatatattaaaaatttcagaggatgaaacatgcagaattgtatttaatgaggttacaaagacagctgtaaaagcatctataaagcaagctagaaaaatagacttggatttagttgatgcccaacaagcaagaagaatattagatagacttgttggttatgaaataagtccgattttatggaaaaatgtaaagtggggacttagtgcaggaagagtccaatcagctgctttaaaattgatttgtgatagagaaaaggaaataaatgaatttataccaaaggaatattggtcaatagactgtacacttaaaaaagaaaaaaagaaatttccagtcaggttatcaacatataaaggaaagaagattgagattggaaatgaagaaacatcaaatggtattataaaagagcttaatcagggaaactttgtagtaaaaagtataaaaaaaggtaagaaaaatagaaatcctctaccaccatttacaacaagtactctgcaacaggatgcaaatagaaaattaaattttatgacaaagagaactatgtcaattgcacaagtactttatgaaggtgttgaagttaaaagttatggtacagtcggattgataacatacatgagaactgattctgtaagaatttcggaagaggctcaagaaagagcaaaagaatttatagaaggtacttatggaaaagaatatctcccaagtgctcctagagtatataaaggtaagaaaaatatccaagatgctcatgaagcaataagacctacttatgtagagattacacctgaaattgctaaagaaaatttaactccagagcagtataaattgtattctctaatatggaatagatttgttgcgagtcaaatggcatcatgtgaattaaatacaaactcaatagatatagaaaatggagactataaatttaaagcatctggttcagtgatctcttttgatggttttatgaaaatatatgaatactcaaatgaagaagatgagaattctgtaatattaccagagcttaaggaaaatgaagagctaaaagtggaatcgctaaatggaacacaacattttacacaaccacagccaaggtatactgaagcatcttttgttaagttattggaagaaaaaggtataggcagacctagtacgtatgttccaacaatttcaacgcttctaggaaggaattatgttgttcgtgaaaagaagaatctaattccaactgaacttggtgaaatagtaaataatattgtaagtgaatattttagacaaatagttgatgttgattttacggcagatatggagagaaagcttgatgatgtagaagaaggaaatgagaattggactcaaatagtagaagaattctttagtccgctaaaagttgctattgaaaaggctgaaaaagaaatatcaaaagtagtaattgaagataaggtcagcgatgtaaaatgtgaaaaatgtggccgaatgatggttattaaaagaggaaggtttggagaatttttggcatgtcctggatatccagagtgtaagaatgctaaacctattgttgaggagttggatgttccatgtcctgaatgtggaaaaccaattgtagctaaaaagagcaaaaagggaaagaaattttttggatgcttaggctaccctgaatgtaaatttgtaagttggtatgaaccggtaaaagaaaaatgtcctaattgcaattcttatatggtagcaaaatattcgaaaacaaaaggaaattatatacaatgctcaaatagtgagtgtaattataaagaagaagtaaaaaaagataacgcaaaagaagaatagaaataaatacgaagaaaacagctttataattaaataagtaatattattttgtcgaatctaataaaaagagtgttgaaaagcaagattttatatgataaactagtcttggtagcaacttgtaaaaaaattcaataaattaagaattttctaacaataatattcttttgctaaataatattgttatacagctgccaaggaggattataatatgtcatcattattaactaaaactagaatgttaaataagattctgcagaaatctggtacagaacctgtagcatttcaagatatatgtacattattaagtgaagttcttgaatgtaatgtatacataataagcaaaaaagggaaagtacttggatatacttttggtaaagattttgaatgtgaagccatgaagaaaaaggtaatagaggataaaaaatttccagaagattataataagacattgttggaagttaatgaaacattatctaatctccctaacgaaggcagatgcgtatttcaagagattggtaagtgcaagaaggtagataagctatcaacaatagttcctattataggaagtagagaaagactgggaacattaattttagctagattcggtaatccatttactgatgaggatttagttatagtagaatatagtgcaacaattgtaggtatggaaatgcttagagctatgcaggatgaaataacagaagatactagaaaaaaagcagtagttcagttagctataggaactctttcgtactcagaattggaagcagttgaacatatttttgatgagttaaatggaaatgaaggacttttagtggcttcaaagatagcagataaagttggtataactagaagcgttatagtaaatgcactcagaaaatttgaaagcgcaggagtgattgaatcaagatcacttggaatgaaaggtacttatattagaatattaaatgaaaagctaatagatgagttaaaaaagattaaataatagatagctatagacaagtaatggtctatagctacttttttattcttttggaatttataattcagtaaaatatgtgaacaattttttgatcaggtaattaactaggggagtatctaaaagaataaaaaataatatatagtttattccagttgtgtataagatttaactattttgagaagactttaagatgattaataaaattttattaaatataaataatgtgcatatttttatttatgtaaggtaaattgaaaaatttttgttgataccataaataccttatgatatactacttaaggtaagaaatacacacactatccaatttatagatttggtgcccttattttaagggaaatttataagctgaagatagtggaggtaaaaaccaaggaggtaacaaaatgtcagtaatatcaatgaaacaattattagaagcaggtgtacacttcggtcaccaaacaagaagatggaatcctaaaatggctccatatatcttcacagaaagaaacgggatctatataatagaccttcaaaaaacagttaagaaggctgaagaagcttataacttcgttaagcaagtagctgaagaaggaaaagatatacttttcgttggaactaagaaacaagctcaagaagcaatacaagaagaagctatcagaagtaacatgcatttcgtaaataacagatggttaggtggaatgttaacaaacttctcaactatcagaggcagaataagaaaattagaacaaattgaaaaaatgcaagaagatggaacttttgacgttcttcctaagaaagaagttataaagcttaagggagaaatggaaaagcttgaaaagaatcttggcggtatcagaaacttagatgcatcaaacgttggagcaatgttcatagttgatccaagaaaagaaaaaaatgctatcttagaagctaagattttaggaataccagttgttgctattgtagatactaactgtgatccagaagaagttgactacgtaattccaggtaatgacgatgctattagagctgttaaattaataactgctaaaatggctgatgctattatggaaggaagacaaggcgaacaattagctgagtagtttatataaactttaaaagggtaagtgagttcactccaactgcccttttattaggtgttaaggattactttcgatatagaggaggaattaaatttatggcaaatataagcgcacaattagttaaagaactaagagaaatgactggagctaaaatgatggattgtaagaaagctctagttgaaacagaaggaagtattgaaaaggctgttgaattcttaagagaaaaaggacttgcagatgcagctaagaagtcaggtagagttgctgctgaaggtatagttaaaacatatatttcagatgataagaaaacaggaacagttcttgaattcaactgtgaaacagacttcgttgcattaaatgaagaatttgttggttttgctgaaaagttagctaaaatggtagctgaaacttcagttaagacagtagaagaacttcttgaagaaaagtttgatggagaagcaacagttgcagaaagtttaaaagctttaatagcaaaacttggtgaaaacatgtcagtaagaagatttactaaattctctattgataatggaatagttagtagctatattcatggtggtggaagaattggagttttagtagaagtttcttgtgataaagcttcagaagttttagatgaagttgcaaaagaagtttgtatgcaaattgcagctgcaaacccattattcttaggtaaagatgatgttgatgcaacatctatggaaaaagaaaaagaaatctacagagttcaagctttaaatgaaggaaaaccagaaaatatcgttgaaaaaatggtaatgggaagaattcaaaagtactttaaagaagtttgtcttttagaacaaccatgggtaaaagattctgataagacaatcaataaattcttagaagagaaatctaaagaggttggttctccagttaagataactagattcgtaagatacgaaagaggagaaggaatcgaagttgaaaaggtagactttgctgaagaagttgcaagacaaatcggtaaatagttggaacctaaagagaacactttgtgttctctttttttaagaaataaagtacatatacttattaaaaaggttttattgatccctaaaatattcaggaggtaattataaatggcagattgtaaatacaagagagtaattttaaaactttcaggagaagcattagcaggagttaatggatttgggcttgattttaatgtagcaaaaagaattgcgcttgaaattaaagaattaattgatatgggcgttgaagtaggaacagtagttggtggcggaaacatttggagaggcagaagtggagaaggcatggacagaactactgctgattacatgggaatgatggcgacttgtataaatgcattagcgctacaagattctttagaacaagttggagttaaaacaagagtacaaactgctatagaaatgaaggaaattgcagaaccattcataagaagaagagcaatgagacacttagaaaaaggaagagttgttatatttgctgctggtacaggaaatccatatttttcaacagatactactgcagcacttagagctgctgaaattgaagcggatgtaattcttttagctaaaaaagttgatggagtttatgataaagaccctcataagtattcagatgcaaaaaaatatgatacactatcatatatagaagtattagaacaaggattacaagtaatggactctacagcgacttcattgtgcatggacaatgaaattcctatccttgtatttgggttagatgagccaggaaatattagaagagctatgtatggagaaaatataggtacattagttgcaacacaaccaagaaaataatagaccagtatgcttgtttattttgtgccattggaagctcgactcgcatgcgctcgctgagtaagcgattcacaccaaatcatagatttgggttctctgctcatcagtaaactctattaatagcatcgctgtgagcagaatttatttccgtgtctgacgcgaaatatacgtagcatctttggtctattatttcttttatgtgtttaaaaagaaataggaggaaaaatcatgattaaggatattattcaaaatgcagaagaaaaaatgaaaaaaacaatatctgtattaaaatcagatttatcaacaatgaaagcaggaagagcgaaccctacgatgcttgatagaattcatgttgaatattatggaagcatgtgcccacttagccaagtagctaatgtctcagctccagagccaagagtacttatgataacaccgtgggaaaagcctctattgaaagagatagaaaaagctatattgaaatcagatttaggattaaatccttcaagtgatggttcaatcatcagattagtaataccagaattaacagaagaaactagaaaaactcttgttaaaaatgttaaaaaaacaggagaagaagctaaggtagctataagatcaataagaaaaactgctaatgataaaataaaagcattgaaaaaggatgcggatttatcagaagatgaaataaaaaaagctgaagatgaggttcaaaagaagactgatgcagttgtaaaggaaatagatgctataattgctgcaaaagaaaaagaagtcttatcagtttaaaatttaaagcctgctagaaaagcaggttttttccttaagcagattttagaattcagaatttagtatgtgaataatttattctttgaacaagctgaagagtaaaaatctaaatatattatttggattggttaatttagttaactcatataagggttaacttatttttggataaaagataagttataaagcgaatttttcctcagggaaagtgaaatatgattcaatatcagtatgaacaagatatttgtgaaattgttgaagagtaatacatattattacattttgtttaaatgaggataattagtaaagactttattgttgacttcatatgaaaaaggtttagtattaataatgtatataaagaatatatgcgggtaggtcaagtttttctaataaactagggggagaaagatgttaaatatatttaaatcaaaaaaggaatttaatcaagattttgacttggatatgaataacataccaaatcatatagctataataatggatggaaatggacgatgggcaaaagaacagaatttacctagaagcatgggacatagagcgggtatggagagtattagaagagttttaaaggaatcaacaaggcttggaataaaaaatttgactttatatgctttttcaactgaaaattgggctagacctaaagatgaggtaggagcaataatgaaaatattggtaacttatcttaaaaaagagctaaaagagtgtcatgaaaatggtgtgaaaatgaatgttttaggtgatatgacaagattgccacaagaatgtcaagatgctttggaagaagcattagaaatcactaaaaataatactaaaataaatttgaattttgccttaaattatggtggcagagatgagataattagagctattaaactcattggttcagatataaagaacggcaaattaaatgaagaagatattaatgaagaattagtagagaagtatttatatacaaaagggatacctgacccggatttaattattagaccatcaggggaacaaaggcttagtaactttttattatggcaatgtgcttactcagaattttggtattctgatattaattggcctgattttaaagaagaaaatttaagaaaagctatagcggattatcaaaatagagataggcgctttggaaaagttaaatagaggagtggttagattttgaagtctaataatagatatttgggtgctgctatgattgctccatttatagtgtttgtatttcttgggggaatttatcttaaatgctttatatttgcattgtcagcgatggctttgtgggaattttacaatgcattaaaagagaatgattttaaaccaatgagaagtgcaggatatatcctgttgataatatattatcttttgaataataatttcgaaaatatgatgtatgttgttgttgctgcaacgttcatattattgatatttccggttataaacttgaaatacacttttattgacacatcactaacattgcttggctttatatattgtggaattttatttagttttgtgtatcttgttaatgtgaaagcacatggtgaatttttagtttggattatatttataggatcatggctttcagatacagctgctttttatagtggaaagctttttggaaagcacaaactttcacctaaagtttcacctaagaaaaccatagaaggttcaataggaggccttataggggcgactgtttttacaggtatatttggaatagtagtacaaaagtatgttaatattatgccaatatataattattttattattggtattttatgcggattatttggacaattaggagatttggttgcatcctcgataaaaagatatgtaggagtgaaagattacagcaatttaattcctggccatgggggagttctagatagattcgatagtataattttttcagcagcagcagtattttattacttaacttttataataaagatttaaaaattagagagaaattaagcgttatatagtataacttatataaggcttaatttttttttctctcataagtttgaaaaagccagatgcgtaaaaaaatctacacatatgaaaagagtgcgaagcacaatacggaacttaaatgaaaagagtgcgaagcacaatacggaacttaaatgaaaagagtgcgaagtacaatacggaacttaatagcagtcatctttaatttttttatataagttaagttatgaagtttttaacagaagatgattggcatataatatacaaatattaataattattaggttagtgaggtgaagaatatttttaaaacttataagaaacttttctcacttttattgtctttcgtatttgtattaataggaacctttttcataaaatactattttaagccgtttttatcaatggttataataatcatagtatgtactcctatatacaaaatcatgattaaggctaaaatgccaagtaaaattgcgggtgctttaagtattgttgctgtcaatattattataatacttgtgacaatatatttgggaagtgaaattttttatataataaaaaaattatacctaacaaatttagaatggatagagaaatttattcaggatatttcagttgcattaaatgtaaattttaataacttggaaattggaaagagtgtaatatctataattaatgatcagaatataaggaagggagcagtaaatactggggatagtgttttagcctattttataggaaacatatgtgccttttttatattgattgataagtcaaaaatcttagaattaatttctatgttacttccaaaggaaatgatgatgagatttagagatcaaaaagaaaattttactcaaatgattggaatagaggggatcttagtcataatttcaactatggagataataatgggcttttgtatacttggggtatcgaatttttttgcacttggtatagtgtgtggaatcttagatgtgttgccatatgttggaactataattgtatttattccgattataatatacaatattataatgaagaatttccttactgcatttggtcttatatgtctatatatactagtgcaagttattagggaaatactagaggctaaatttttaggcgataaattagatatgcaccctcttgttatattgttatctatatacataggagtgaaaatatttggtattttaggtatattaattggcccaatgtatagcattctagcaaaagaaataatttatagtactgagtgattatgaagaataaggaatcctagtttgatttaaataatttatttaaagttaattaagaggtttttgatcttcagattaaaccttgatcagtactgattaagatttgcttttaggaggaaaaagaatgaaaaacatttctatactaggggctacaggttcgataggatctcagaccttagatgtaataagaaaatcaaatggagaactaaagcttataggagtaacagcaaacacatctgtaaaaaaagttattgagataattgaagagttcaaaccttcttatgtaggtatgatggatgctgcaagtgctcacgaaataaaaaaatattgtgaagagcatgataaaaagattaaagtattggaagggatagaaggacttgatgagatagcatctttaaatgaaattgatatggtagtaacttctgtagttggaatgataggattagagccgactatgaaagctatagaggcaaaaaaagacattgctcttgcaaataaggaaactttggttgtggcaggcgaaattgtgatgaaagctgccaaagagaacaatgtaaaaatatttccagtggattcggaacacagtgctatatttcaatgcttaagggggaatgatataagtactttgagaaaaataattttaactgcttcaggaggaccttttagaggaagaactttagaaagtcttgaagatataaaggtggaagatgcactgaaacatccaaaatggaacatggggagaaaaatttccatagattctgcgacacttatgaataaaggacttgaagtgatagaagcacattggctttttaactgtgattatgataatatacaggtcgtagttcatccacaaagtatcgtgcattcgatggtagaatataatgatggaagtatagttgcacaacttggagcacaggatatgagattaccaatacaatatgctctactttacgaaaatagggaaaagcgtattgcagatacaatagatttttatgaaatatctcaattaacatttgaaaaacctgatataaatacttttaaagctttaagtttagcgtttaaagctgggaaagccggcggacttatgccaactattttaaatggggcaaatgaagcggcggtagagttatttttagatagaaagataaaatttttacaaatagctgacataatagaaagatgcatggaagtattcaaaactcaggcgaacaaggagttaaccctagaaaacattattgagttagataaagaagttaaggaatatgtaataaaaaatgcggtactttaaggagggaaagatttaatatgtatataattttagctatattagcatttggagtcttgataatagttcatgagcttggacattttacattagcgaagcttaatggagtaagagtagaagaattttcaattggaatgggaccgaaaattttttctaaccaaggaaaagaaacacaatattctttgaggttatttccaataggtggatatgtaaaaatgatgggagaagaagaaagtgttgaggatgaaagaagtttttcggcaaagtctccgttgagaagaataagtataataattgctggtgtgtttatgaattatgtattagcgatagttatttttactttctttatacatgcgtttgggtacacaaataagattccgactggcgttactccagattcaccggcttcagaagcagggattttaccaggagataaaatagtgaaagtaaatggaatgagagctttctcatacgataatatttcggctggaatagtattatcaaatggaaatccagtggatatttctattgaaagaaatggagaaaagaaagacgttgtagtaacaccaaagaagaatgaacaaggacaattgttaataggacttaattttgaaagagttcaaaatccaggatatgctgagagctttaagcaaagttttaatcagacagcatcgttagtttctcaaacttttaaaggtttagagatgatattcacaggtaaggcaaatttaaaaactgatgtaggtggtccacttacaatagttaagatgtcagcagaaactgctaaagctggaatttggccactactttactttactgcttttttaagtgttaatttagctgtttttaatctcttacctttcccagctttagatggaggctggtgtgtgatattacttatagagttaataactagaagaaaagttccggataaaatagttggagttttaaattatataggatttgctgcgcttataggattgatgatattagtgacaataaaagatatattatttcctgtaaagttttaggaataaaaaatgattttataaccataaaaaacttgcattcagatttgaagtgattcttatatgaatgcaagtttgctaagtttaatgtattaaacttactatacataattttaataatgtacaatttataaaaattataagatgatattaaaagtagtattagaaatatttttataaaagaaaaatgtataaaaatatatatgatgcaattcacatttcacaattcacaattacggctaaaattcttgcaatatttttagaattatgatgaagaattatttttgcaatatatataatgtttatattttaggttaattataattagaggagatacattgtatggaaagaagaaaatctagaaaagtcaaggttggaaatgtatttgttggaggggagtcacctgtcacagtacaatcaatgacaaacactcgtactaaggatgtagaaagtactttgaatcaaatagaaaagctatataacgctggatgtgatatcataagatgcgcagttttggatatggaagatgcagaaagtctaggggaaattacaaaaagatctccaataccagtagttgcagatatacattttgattataaattagcgctaaaagcaatagaaaatggtgtctcagctcttagaataaatcctggtaatataggaagtgtagatagaataaaaatacttaaagaagcttgtagtgagaaaaagataccaataagaataggtgttaattctgggtctctagaaaaagatattctagaaaaatatggcatgccaactgcagagggtttagttgaaagtgctttaaggcatgttaaaattttagaggatttagactttcacgatattgtgatatccataaaatcatctagtgtacaaatgatgatagaatgttacagattgatagcagaaaaatgtgactaccctcttcatttaggagtgacagaagcaggaactattcaaagagggacaattaaatcaagtataggaatagggacgcttcttgcagaaggaataggtgatactataagggtatcattaaccactgatccaattgaagaaataaaggttggaattgaaattttaaaagcattgggattaaggaaaaaaggtgttgaattcgtatcttgccctacttgcggcagaacacaaataaacttgataaaaattgcagaagaagttgagaaaaggcttgaaaattataaaaaagatattaaagttgctgtcatgggatgtgttgtgaatgggcctggagaggctagagaatctgatattggtattgctggtggaaaaggagaaggaataatttttaaaaaaggcgaaatcataaagaaagtaaaggaagaagatcttattgatgccctaatggaagaaatagaaaaattatgcacagatgaaaaaggtgcggagcacaattaagaacatttcacagatgaaaaaagtacggagtgcaattaagaacaactcacagatgaaaaaggtgagaagaaaaaataagaataattcatagattaaaaaggcacgaagtgaaattaatgatgttttcgcagattaaaaaatcatggagctaagtatatataataatgtatatgtctataaaaggtatttttaaattgtgaattatgaactatgcattaaaatattgagcagatatttaaaatttgggaatatcacttgtaaagttaatttgtttatgatatcatataagaagatttatttctaatagctagaaaaaaggagtgggaagttacccgctctttctgtttgtaacgcaactaacttaagatagttgcgtttttgattacaaattttaaaaatgcataagatagatatgagacatgtgtttttaaaagatgaaagtgagggttagaaagatgaaaaaagatgtattgattgaaagaattgaagaattagtaagacctattgtttcagaattgtcatgtgaattatattatgtagaatatgttaaggaaaacggtgagttttacttaagaatatatatagataaagaaggtagagtatcactaaatgattgtgaagcagtttcaagaagagttagtgatgttctagattcagaagatccaattaaggaagcctattatctagaagtttcttcaccaggtctaaatagaggattatataaagaagagcattttaataagtacataggaagagaagtgctaattaggcttactagttcactaaatggagtgaaaagtgtaaaaggagtattaagagatgtctcagaagattctatattagtagaaggcgagacagaagttaaaataccaagagataaaattaaagcagcaaatttagaaggggaaatataacgaggagggtataaaaatgaatgaagagtttgtaggtgctcttaaagaattagttaaggaaaaggggatttgtgaagatttactttttacaactattcaagatgcgatggttgcagcgtataagaaaaattatgccaatgccaatacaaatgcgcaaaacgttaaagttaatattgatagagaaacaggagaaatacatgtatatgctcaaaaaacagtagttgatgaggtatatgatgatgtaacagaaatttcattagaagaagctaaagaattaaatccaaaaagtgaagttgatgatattataagtttagaagtaactcctaaaaatttcggaagagttgcagcacaacttgctaaacaggttgttactcaaagaattaaggaagctgaaagaactataatatatgacgaatacaaagaaaaagaatttgatataattacagggactatattaagaaaagataaaggtattgtttttgtaaatttgggaaaattggaaggtataataggacctaatgaacaaattccaaatgaggaatataaattcaacgaaaagttaaaactatatatagttgaagttaaaaatggtaataaaggacctcaaatacatgtatcaagaacacatcctggattagttaaaagactatttgaacttgaagttccagaaatatttgaaggagtagttgaaattaaaagtatttcaagagaagcaggttcaagaagtaaaatagctgtatactctaacgatgaagaagtagatccaatgggcgcttgtgtgggaccaaaaggagtaagagtacaaagtatagttaatgaacttaaaaacgaaaaaatagatataataaaatggagcaagaatccagaagaatttatagctaattctttaagtcctgcaaaggtcttaagtgtagtagttgatgaagataataaatctgctaaggttgttgttgacgataatcaattatctcttgcaataggtaaagaaggccaaaatgtaagacttgcggctaagcttacaaattggaagatagatataaagagtaaatcccaaaaagaagcacaagatgaagaagatgaaagaattctaaataccgaagtagaaatagaaaatgaacaaactactgatttaaatgaattagaaatttttgatgatattgaagttgatgattcaatagatgaagaaacttcaatggaagaaatacaagaatagaggggtgcttttcatgaaggttaagaaaattcctttaagaatgtgcactggttgcatggaaatgaaacccaaaaaagaattaataagagtagttaaaactccagaaggcgaagtgtgtgttgatctgactggtaaaaaatcaggaagaggcgcatacatttgtaagaacacagagtgcttagaaaaagcatttaaagcaaaaagacttagtagaaatttagaaattcctataagtgaagaaatttataataaactaaaggatgaagtaaataatgaataagttttttaactttctaagtatggcaaagaagtcaggaaacttgcttgaaggatatagcaagtgtgatgactatagaaataatactaaaatttatctttttatcatatctaatgatttatcagataaatctaaagataaatttaaaaagcattgtaatgaaaaaaatataccatatattgaagacttctcaaaagaacaactaggacctccaattggacgtaaagaaattatgttgctgggaattctagataacgatatagcaaaaagactgttagcgttatatgaggaggaaaaaaatatatgagtagataataatacgggggtgactgcatgtcaaaaataagagtacatgaattagcaaaagaattaaacatagagtcaaaggaattaataactatattaaaggaagaatttaatatagaagtaaaaaatcatatgagtacaattgaagatgaagatgctgaattaataaaagaattattagcaggaaaatcaccaagcgatttagtagcatcggctgataatgctgagaattcaaaaagcatagttgacgaatatgaagatgaattagcagaacaacttaacaaaggtataaagaaaaagaaaaagactaaaaaagaagaacaagaagaagcaagaatagctgctgaagcagaggctgaaggtaaagtaattgaaattggtggaagcataaccgttaaggaattggcagaaaaattgcaacaaccttcaaatgatgtaataagaacgttaatttttgctggagttatggcagcaataaatgcggaaatagattttgaaactgcagaaaaggtttgtgctgaatatggagttttagttgaaagaaaagaagaaattcaagaattagaagtattaaaaatagaagaagatgatgaagaaaatcttcaaaagagaccaccaattgtaactgttatgggtcatgttgaccatggtaaaacatctttacttgattgtataagaaaagcaaaagttactgatacagaagcaggtggtataactcagcatataggtgcttatactattaaattgaacggagaagaaataacattcttagatactccaggtcatgaagcgtttacagctatgagagctagaggtgcacaaattacagatgtcgttatattagttgttgctgcagatgatggaatcatgccacaaactaaggaagctatcaatcactgtaaggcagcaggagttcctattgttgttgcaataaataaaatagataaaccaggagcaaatgtagatagagttaagcaagaattagctgaacaaggattgcttgcagaagactggggcggagatactatatgtgaagaagtatctgcgaaacaaaaccttaatattgataagttattagagatggttctacttactgcagaaatgcttgaacttaaagcaaacaaagatagaagagcagttggaactgttatagaagctaaattagataaaggtagaggagcagttgctagtcttttagttcaaaatggaactttaagagtaggagattctatactagttggatctacatatggtagaataagggctatgtttgatgatactggtaaaaaaataaaatctgctggaccatctataccagtggaggttctaggactttctgaagttccagaagctggagatagatttaatcaagtaaaagatgaaaaaactgctagaaatatggctgaaagcagaaaagacaaattaaaagcagaaactttacttgctaaccatagagtatcattagaagatttatataatcaaattaaagaaggtaaggttaaagagcttgctataatagtaaaagcagatgttcaaggttctgttgaagctataaagcaatctttagaaaaactttctactgatgatgtaaaggtaagagttattcatggtggcgttggagctataactgaaacagatataactcttgcgacagcatctaatgcaatagttatcggatttaatgtaagacctgataacaatgcagctgctcaagctgatagagatggagtagatattaaatcttatagaattatctatgatgcaattgatgatgttaaatcagcaatgataggaatgcttgaaccagattataaagaagttatattaggaacagcagaagtaagagaaacttataaaatttcaaatgtaggaacaattgctggttgttatgtactaaagggtaaacttcaaagaaatgcagagacaagagttataagagatggaatagtaatatttgaatctgcattatcatcattaaagagatttaaagatgatgcaaaagaagttaatgctggatacgaatgtggtttaacaattgaaaaatttaacgatattaaagaaggtgacatcgttgaatgcttcatgatggaggcaattaagagaaaagaactttaaaagaggtgaagatcaacatggcaaactatagaggtggaagaattaacgaagaatttaaaagagaaattagtaatttaattcaaaatgaagttaaagatccaagacttacagctatgatttcagttacagatgttaaagttacaaaagatttaagatatgctaaggtttatgtaagcatattctctaaagatgatgaggaaaagaaaaataatctagaggcattaaaaaatgcaagtggatttataaggaaatcagtaggccaaaaaataaatttaaggcacacaccagaaataattattgaattagatgactctataaattacggtatgcatatggatgaattaattcaaaggataagtaagggtaatgagtagtcttaaagaaataaaagaagagattttaaaatcaaaaagaattggattatcattccatacatctccagatggagatgctataggtagcactttagcactactaaatgcattaaggcatttagggaaggattcatatattatatcaagagatgttatttctgataacctctctttcctttcttttgcaaatgaaattgatggtaatactttagaaccaaaagaaggtactgatcttgtaataatactagattgtggtaatgttgaaagaatatctgcagatctaagtaattacaaaggtaaggtcattaatattgatcatcatatttcaaatgaagaatatggatttattaattatgtagatgtaagtgcagcagccacatgtgaaatatcatatttgctagcagaagagttaggaattgattttaagaataaaactgatgttgaaataaatatagggaacgcagtttatacaggaattgtaacagatacaggttcttttagacattccaatgttactaagagaactcataaaatagtatcagaacttatagaacttggagtaaacaacagtaaagtccatagcaatctttttgataataaaccatttgagaaagtaaaattaatgggatgtgtgttatctaatattgagctcgctctagaaaataaagtggcagtccttgagataccgaagggaatgttagaggaatttaacttaaaaaatactgatacttcagatataatttcagttggccttggaattaaaggcgtagaagtttctatgcttttgaaagaagttgaagatggagttaaaggaagcttaagatctaaaaatgatgtggatgttcgaaaagttgcagaagtatatggcggtggcggacatataaaagctgctggagttatgcaaaaaggcgtagatatagaaactgcaaaagaaaatctgctaaagatacttaaagaagagcttaaataataaaaaataaaatataaattatatttatgaaaagtaagtaataacttcacttatataaggaaggaatagagaattcatatatgaaagatacaaaaacttcacagataaatggagtattaaatatattcaaaaataaaggaatgacttcctttgatgtagttagaaaaataaaattcttagctaacgagaagaaagttggtcatactggaacattggacccagaagctactggagtccttccagtctgccttggaaaagctacaaaaactattgattatataatgaacagtaataaggtatatgaggtgaagtttctacttggagtgaagacaactacatatgatcttgaaggtgagatattggagaagaatgaaatagatcatattaagagtgatgaagtttcagaggttgcattatcttttatcggagaatatgaccaagttccacctatgtattctgcccttaaaaaaaatggagtaaggctctatgatttggcgaggaaaggtattgaggtagaaagagaagcgagaaaagttagaatatttaatatatcagacttgaagattgaattaccttatgtatatatgaaagtagcttgttcaaaagggacatatattagaagtttatgttatgatattggtgaaaaactaaaagttggagcagctatggcagaattaaatagatctgaaacatctatttttaagcaatcagatagtgtaaacatagatgatttaactaaggaaaatatacaagattatattatgactatagaggatgcactttctttttaccctaagattacagtaaagagtacatttactaaattattagtaaatggagttaaagtattcgataagagattgacaaatgaaaaaagagaaaaaaatgttttatatagggtatatgatagtgaaggtacttttataggaattggaaaacaagatgatgatggattcaaaatcgaaaaattgttgctttaggcatcttaactagtatgtagctgtttttctgggtgccttgatttaggagtaaggataatgataattatagataaacattcaaaagatattcaaagttctaataattatatagctcttggaagttttgatggacttcatattgggcatctttctttaataaacaaagtagtagaagttgcaaaaaaaaacaaagggagaagtatggtttttacatttaaaaaccatccgagaactcttataaataaagaaaactcagtaaaacttttgatggacaatgaaaggaaagcaaaaattctggaaaaacataaagtagatatagtttgctttaaggaatttgatcttgaatttatgaaaatgactccaaaggaatttatagagtttttgatagttaattataatatcaaggggtttgttgtagggtttaattataaattcggatacaagaatttagggaatgtagaacttctaagagaattgaaaaatgaatatgggtatgaactatatgttatggatccatgtacatataataacgatgttgtaagcagtactagaattagaaaagccattcaagatggcgatgtttcagaagctaataagatgctcagcatgccttacacattaagtggcgaaattattcatggaaagaagattggaagaactataggttttcctacagcgaatttaaaatatgatgaaaatttcattttacctaagattggtgtatattatactaatattaaggtaaataataatatatataaaggaattacatctgttggatataatcctacggttgaaggtagaaatttaacggtagaaacgtatatattagattttaataaagaaatatacggagataaaatagatgtgagttttataaaaaaaatccgcgacgaagaaaaatttaatagtttagaagagttaaaggaccagctcgaaagtgataaggcttttgcaaaaaatgagaattgcatgtcggctttaataatatagtttacaataatagttacttttgatataataacacagggaacctaattctaagttgtaaggtgccatcttttacttggaactaggggataattaatataatacacggaggtgcacttataatggataaggcaagaaaattagaattaattaaaaagtttggaagaagcgaaggcgacactggttcaccagaagttcaagtagcattacttactgaaagaattcaatctttaactgaacatttaaaagttcataaaaaagatcatcactcaagaagagggctattaatgatggttggtcaaagaagaggtcttttaaactatttaagtgatcaagatatcgaaagatatagaactttaatcaaagaattaggtttaagaagataatttttagagcggagttttccgctctattattttaaactatacaaattatagaaaaattatacaatattattaatgattagatgaacctaaagggaggtcataaattatgaataacgttctaacgactgaaatcgctggaagagaattgaaagttgagttcggaaaagtaggtatgttatcaaatgcagcaacatttactagctatggagacacagtaattttaactaatgttaatgcatcagagcagccaagagaaggaattgatttctttcctctaagtgttgaatatgaagaaagattatatgcagtaggtaaaattccaggtggatttatcaagagagaaggaagaccatcagaaaaagctatattaaatggtagagctgttgatagaactctaagacctctatttccaaagggatacagaaatgacgttcaagttgttactacagttgtatccgtagaaaaagataatttgccagaaatcttagcaattaatgcagcatcgcttgcattatgcctttcaagtattccttatacaattccagctgcagcagttcaagtgggaattatcgatggtaaattcgttacaaatccagatacagaaggccgtgaaaaaagcattcttcacttaacagtgtgtgctacaaaagaaagagtaatgatgattgaagctggtggacaggagataccagaagatactatgatagacgccattaaatatggttttgatgagtgtcaaaagattattgcattccaagaagaagcagtagctaagtttggaaagaaaaaagatgagccagtattatatgctgtagatccagaacttgaaaaagatgttaaagaatttgcatctgacatgattaaagaagcaatgtacatcatggaaaaagatgaaagaaatgctgctgttgatgcagtttatgaaaaagttaatgaagcatttggtgaaaaatatgctgataaaatgggtgatatcaaagaagttctttacactatgcaaaagaaagttgtaagacatatgcttctaaaagataagagaagaccagatggaagagcatttgatcaaataagaccattagggtgtgaagtaggaattttacctagaacacatggtacaggattattcacaagaggattaactcaagtaatgacagttgcaactcttggatcaattagcgagattcaaatactagatggaatagatgaagctcaatcaaaacgatatatgcatcattataatttcccaggatacagtgttggagaagtaaaacctttaagaggtcctggtagacgtgaaataggtcatggagctttagcagaaagagctttagaaccattaatcccttccgaagaagaattcccatatacaataagattagtatcagaagttttaagttctaatggttcaacttcacaagcatcagtttgtggttcaacattagcattattagatgcaggtgtaccaattaaaagaccagcagctggtattgcaatgggattaataacttcagaagatttaagtgaagaagcagtattaactgatattcaaggaatagaagatttctttggagatatggatttcaaggtagctggaacaacagaaggtataacatctattcaagtagatactaagcttcaaggttttagttttaatgtagtagaaaatgctataagagatgctagaaaagctagacttactataattgataaaataaatgaatgtatttctacacctagagaagatgtttcattatatgctccaaaaacacaaattatgagcataaatcctgataaaataagggatgtaataggagcaggcggtaaggttataaataaaataatacaagatacaggagttaagatagatataaaagaagatggaactgtatttgtaagctcaactgatcataatggtgttaatgaagccataaagataatagaaggattaactaaagaagttaaagccggagaagtttatcttggaaaagttactaaaataactacatttggagcatttgttgagatcttaccaagtaaagaaggattagttcatatttctaagttagctaaagaaagagtgaacaaagtagaagatgtagtatctattggagatgagattttagttaaggttacagaaattgataaccaaggtagaataaatctttcaagaaaagatgctttattagaacaagaaaataaggaagagaaataaagggcaattaattgccttttttttaactaagaaggagggcaaggacaaaatgtataacacatatacccttaaaaatggattaagaattgtaacagaaaaaatagaacacttaaactctatcagtgttggagtaatggttcaaaatggttctagaaatgagaacccagaagttaatgggatatcgcattttattgagcatatgttttttaaaggaactgataaaagaacttcgaaagaaataatggaggatattgagaatgttggaggacagatcaatgctttcacaagtaaagaagctacctgttattatataaaagcattagatacccatctggatttaactttagatgttctttcagacatacttttaaatgcaaaatttgatccagaagagatagaaaaagaaaaaggcgtagtaattgaagaaattaatatgagtgaagattcaccggaagatgtattagatgatgtgcattctaaagcttgttttggaaatgagtcgttaggatatcctattttgggaacaataccattggtaaagtcatttactagagaaaagatactaaattttattagtgaaaagtatactccatataattctgtaatatcagtttgtggtaaattcaatgataaagagttagatgaattgattaataaatattttggcgaatggaaaagcaaaggtgaatatactccggaatatgataaaacaataatacaagttgattctgcatatgcaaagaaagaaattgagcagcttcatatttctttgggattagagggattgccttatggagatgaaaacaattacgcattagtgctgcttaataatatatttggaagtggcgcatcttcaatccttttccaaaaagtgcgagaagaattaggactgtgttattctataacatcttacctgcaaccatttcagggagttggaacgttaaatatatatgccggcttaaatagaaattatggagagaaggccttagaggttatagaaaaagaaattactctatttagtaagaatggaataactgataagcagcttgaaataaacaaggaaaaaattaaagctaattatattttagggcttgaaagtacgagttcgagaatgttttccaatgcaaagacattcctgtttagaaataaaataaaaactcaagaagaagtaataaagaaaatagataatataagaaaagatgatatacaatacgtcttagaaagatgttttaaaaagggagttataaatgcagcgtatgttgggcaagatgtagaatatagtaaattagattctataatactaaagaatgccaaagcatatgataactcaaatcataatggtaaaattaatttatagaagattatgtaataatacacctccttttctcatattattttatgagtactaaaaggaggtttttattatgagcgaagaaaataaggtgaaatatttaagtgatatagagagatacgaacttattaatataaatgatggtgaaaagtatgattatctattgaataatgatctaataatagatgaagaaggaaattttaaatatttaatagttaatttaagtggcggaaaatttaatctatttagcagtaaagattttttagaaattccatgggattgtgtaaaaaaaattggtgctaaaactatcatattagatgcagatgaggaagtaataaaaaaagtaaagttataattcaggaggaaatttaatgaaaatagttgtacaaaagtttggaggaacttcagtatctactgaagaaaatagaaagaaagtaattgaaaaagttaagagtgctattaaagacggatatagtcctgttgtggtagtatcagcaatgggaagaaaaggtcagccatatgcaacagatacattattatcattaataagcgataaatttaaaaatgccaataagttagcacaagacttattaatgacatgtggagaaattataagctcagttgttatgagtaatgatttatataatgcaggaattgatgctgtaccacttactggcggacaagcaggaatattaactgataataattttactgatgctacttgtattgaggtgaaacctaaaaaaatactagagttagtgtctcaaggaagaattcctgtagtaactggatttcaaggaatgactgaaaacggatatttaactactttaggcagagggggaagcgatacgacggcttctattttaggagtggcccttaaagcgtcagaaattgaaatatatactgatgtagatggaatcatgacagcagatccaagagttgttgaaaatgcaaatttaattgatgtaataagttataatgaagtattccaactagcggataagggtgcaacagtaattcatccaagagctgtagaagttgctatggaaggaaatattcctatattaattaaaaatactatgagcaatagcaaaggaactttaataaacaactttggagataaaggtaatgacaggataatgacaggaatcgcaagccaaaagaatagaattcagatttctataagagcggcagaaaataaaggaaatacaaaatataaaaatgtattggatttattagctgcaaataaaataagcttagatttaataaatatattccctgatgagcaaattttcactataaatcaggtggataaagagattttagaaaatgttctaaatagtgctagcttaaagtatactttgatagataactgcagcaaagtagcagttattggttctagaatgaagggaataccaggagtaatggctaaaataatcaaggcattaagtgataataatatagaagtactacagacagcagattcgcatatgacaatctggtgcttggttcactctgaaaacgaaaaagaagcgataaatgttttacataaaacttttaaactttaatataaaggaagttaaactaagtgcattccatgagtttttatatagagtaagttagattaacaagataatagatttgggattcaaaaggaaaatcggctcgcagggtaagttcaattagctgaatcatagattttgaatttaaacggaaactcgactcgctttgtttgctgagtaagttcaattaaccaaattatagatttggaatttcacttatgaataaaataattcctactgtacaaaataaaaagagtataggaggaattattttatggataaatatattttaaataataatgagaaagagaaagaaaaagaagataaaaatacatcagaagcacaagataaaatagaaaatgtaaaagaacttggaaatactacattagcaacaccaaataaaagaatacaggttttatctataatagggcagattgaaggacattccgtacttccgccacaaacaaaagccacaaaatatgaacacatcatacctcaattaatagacattgagcaaaatgatgatgcaaaagggttgcttatagtcttaaataccgttggaggagatgtggaagcaggtttagctatttctgaaatgattcgaagtatgtcaaaaccaaccgtttcaatagttattggtggaggtcactctataggagtgccacttgctacatcagcagatttttcatttattacaccatctgcaacaatgatagttcacccagtaagaatgaatggatttgtaattggagtatcgcaaacatttgaatactttaagaaaatgcaagaaagaataaatgagtttatagttagaacatcaaatataaaacaagatactttagaaaggtttatgcttcaaacagatgatttattaaatgatgttggaacaatgttaattggaaagcaagcagttgattgtggacttattgatcaagttggaggaatacaggaagctttaagtaaacttaatgaattaatagaaaaatagtatctatttttaaggttatagaaaaaaatctatagccgatttttgtttttagtgttatcttattaaaggagaattgctattcaatgtagaaataaaaatatgaggtgatttaaggtgggtagaactaaaggcaaacatagcactacaaaaagtaaaaaagatgaaaatacaataaatccagatgtagtaggaatagtgtatattgcaacaggaataatacttggcatagcaatatacacttctttagctggaatattatcatctttagcacaaagagtatcgtatgtggtaattggaataggtgcaaatgcattgcctatttatttgatatattttggattccaatacataaaaacaagaggaaatattaaattaagtaagaatttttttggaataactatattggtgtttgttacaatattgacatttggaacaataaacattcaaagtttagacggccaaggcagtttttttgaaaatattaaggttatacttaatgatagctcacagactcctcatggtggaataatggcatatcttatatgttatccaatgtataaaattataggggctctggggacatatatagttcttctcgcattttcaataattgccatcactttgattttcgatattactctttatgatttagggataaaggcctacaataaaggtgaaaaaataagaaatagcagaagaagtagaagagtaagggatgagcagaagccagttagagagaattttataaatatagtagaaaaagatgataaagaaaatgaaaaagaagcatttctttctggtgtagaaaagaaaataaaaattctagattttatgaaaaatactagtgatgatacagaaatttcacctatatcgaaagctgaagtatcatcagatattcaaatagagagttttatagaaaaacctacgcaaagtcatactaagaaaaaagaaaacttaggtaatgatgttaaggaagtagtaaataaagagatacaagagcatattatggaacaaaaagagactaaagaatataagcatccaagtcttgaattattaaaattaaattcaaatacaaaacttaatagtagtgacaaaaaagaattaatagagaatgctaataagcttgaagaaatattatctaactttggagtagatgccaaggttactcaagttacaaaaggtccatcagttactagattcgaacttcagccaagtccaggtgtcaaagttagtaagatcgtaaatctatctgatgatatagctttaggattagcggcttcagggataagaatagaagctccaattccgggtaaggcggcagttggtatagaagttccaaatgggaaacaaaaaccagtctttttaagagaggttctagaaaatgatgaatttatcgagtctaagaaaaagcttgcatttgctctaggaaaagatatatcaggaaaatgtgttgtgggagatttgagtaagatgccacatacactgattgcaggggcaactggttctggtaagagtgtatgtataaactctcttataataagcctattatataagtataatccagaagaagttaaacttttaatggtagacccaaaggttgttgagttaaatgtttataatggaataccacatcttttgattccggttgttacagatcctaagaaagcggcagcagctttaaattgggcagtaaatgaaatgaccaataggtataagctctttgcggactctggagttagaaatatggagtcgtataatgaattgtttaataggggtataatagaacaaaaactgccatatatagttattatagtagatgagcttgctgaccttatgatggtatgccctaatgatgtagaagattatattggaagattagcacaaatggcaagagcagcaggtatgcatttagttatagcaactcaaagaccatcagttgatgtaataacaggggtaattaaagcaaatattccatctagaatatcgtttgcagtatcatctcaaattgattctagaactatcttagatggatccggagcagaaaaactgttagggaaaggtgacatgttatattatccagtgggagaaagtaagcctcttagagttcaaggttgcttcatatcggaagaagaagtagagcaagttgtatcgtttattaagagtgaacagggtgatactaagtatgaagaagatataattgatcatattaataatgcgtcagattcaaaatctgtagatgcaaatgataataatgatgatgttgatgaattgcttaatgaagtgataaatgttgtggttgagtatggtcaagcgtcaacttcgtttattcaaagaaagttcaggataggatttaatagagcttctagaataatggatcaattagaagaacgaggcattatatcagaaaaagatggaagtagaccacgacaggtgcttattactaagcagcaactattaggagatgaacatgaagaggaaaattaattatgcccaaaaagtttaaaactttagttatgattaattatgaaataaaattaaactttatgttaacttttttaatttaactcttttgagaggaaataataagtgatttttatgagatatgggagtagtatatgtataatagcaacttgtaaaatgtagttctaatttgttataattaagactattagaacgtaggaggatataagaagttgagcgaaattaaaatagaaatagcgaagaataaagaacaatataatgaagaggcttcaagcaagtataaagttggaatggtaagcttaggatgtgataaaaatagagttgactcagagataatcttaggtaagatgagtgatgagtatgagataactaataatcccaaaaacgcggatataattatagtaaatacatgcggatttatagagagtgccaaacaagaatctattgacacaattttagagatggctaattataaaattaattataaatgcaaactgcttatagctacaggctgtcttactcaaagatacggagaagaattgagaacattaatacctgaaatagatataatgcttggagttaatgattataataaaataaatgaaattataactgaatttatagaaggtaataaattagcaacagaacttttaaattattctgatgagaatattaatgaaggaaagagaattattacaactcaaagagaaagtgcatatataagaatagcagaaggatgcaataatttttgcacgtattgtataattcctaagataaggggaaaatttagaagtaggaagatggaaaatattataaatgaagcaagagatttgagtgagagtggagtaaaggaaatcatacttatagctcaagatactactttatatggaagcgacatttatgggaaaaagaatcttcatgttcttcttagcgaattatccaaaattgaaggaattaaatggataagggtactttattgttatccagaagagatatatgatgaacttataaacgaaattgctagtaatgaaaaagttgtaaagtatttagatatacctatacaacatataagcgataagattttaaaacttatgggaagaaaaacgagtaaaaaagatataattaataaaatacaaattttaagggaaagagttcctgaaattgttataagaacaacatttatagtaggatttccaaacgaaactgaggaagattttaatgaaattattaatttcttaaaggaatataagcttgataaagtaggagcatttacttattctcaggaagaagatactccagcagctaagatggatggtcaaatagaagaagaaattaaggaaaaaagagaagaagatttaatgcttttacaaaagaatatttcagaagaaataaataaattgaaaattggaaagttatatgatattcttgttgagggatataatggaaagtgctattatggaagaagctatgaaatggctcctgatatagatgcaaatgtattatttgaatcaaatgcaaaaatagaaaatggtcaatttgtaaaggtaaaaatagtagagaatatggattatgatttagtgggagttgttgttgatgaatcttgcaaataagttaaccttaattagaatatttttggttcctgtgtttttagtatttatagctgttaagggtataccttatggcagttttataggtacatttatatttatcttagcatcattaactgataaattagatggatatattgcgagaagcagaaatcaaataactaattttggaaagtttatggatcctttagcagataagttactggtcacagctgcgttaatttctttagtagaattacacgtagtgccatcatgggctgcagttgttataattgctcgtgagtttgctgtttcaggtctaagatcaatagcagcagcgcaaggaagagttatagctgcaagttggtggggaaaagtaaaaactgttatacaaataatagcaataattttattattattaaaaatcaatatacatgacgcaagacttttgaaaatctttgttatagagaaccattatttaaaactattttttgcaatagccccaaatctaatgcttatgattgcagttatagtaacactaatttcaggttacgattactttaagaagaataaggaagctgtttcttacgataaataaaatatataagatccatgtttagaaatataaaaaaatggatatgaattaaaaaggttccttctttgctagcaaagaaggggcttttcttagaattaattattgactatggtttgtaattaatttataataaatatagaacataagttcgatggaagggagttaattagtattatgggaattataaatgcagaaaagttaaaagcaattgaaagtgctatgagtcatatagaaaaacaatttggtaaaggatcagtaatgaaattgggtgaccacaatatttcaaatatggatgctatatcaacaggatgtttagatttagatatagctcttggaattggaggagtacctaagggtagaattattgaaatttatggaccagaaagttcaggaaaaactacagttgcgcttcatatagcagcagaatcacaaaagaaaggtggagcagtaggatacatagatgcagaacatgcattagatcctagttatgcccaaaaacttggtgttgatgtagatagtttaataatttcacaacctgatacaggagaacaaggacttgaaatagctgaagcactagttcgttctggagctattgatgttttagtagtagactctgttgcagctttagtacctaaagctgaaattgaaggagaaatgggagattcgcatattggtcttcaagcaagacttatgtcacaggctttaagaaaacttgcaggaacaataaataagactaattgtgttgctatatttattaaccaactaagagaaaaagttggggttatgtttggttcaccagaaacaacaactggaggaagagcattaaaattctatgcatcagtaagacttgatattagaagaatagattctataaaacaaggggattctataataggtaacagaacaagagtaaaagtaatgaaaaataaagttgccccaccatttaaacaagcagaatttgatattatgtataatgaaggtatttcaagatatggtaatatagtagatgttggagtaaaagaagaaatagttcaaaagagtggagcttggttttcttatggagacataagattaggtcaaggaagagaaaatgctaaattatatctaaaagaaaatcctgaagtagctttagatatagaaaatcaaattagagaaaagtataatcttgcaccagcagaattatttaaaggagctgcaccagaagtagctaacgaagatataaaagataaagatgatgttgctgtagatacaaaagaataaagaagatgtaataaatagaaagtttaaatgtaaatttacttcataatatttattaataaatatatagctgcatatattatgataactcatatatatgcagctatattaagtatttaacagcataatgcagtatgtaacagttatatgcgcaaacttgacataattttgtttttaatatagaataaaaaggaatactggtttatcatattccaaatgcagtgagaagaatatgacacctactatactttcttgttaataatataatgagaaaatgataaattaggaggtgtttatgtggtaacagcagtaatgatattaatagatgtaatagttttattaatattaggaatagtggtttataaaacgattcaaaacatatcaaaagcaaagattgaatcgcttgaaaaagaagcagaagaaattctagtaagagccaaaaaggatgcagaagcaactaaaaaagaagcaatccttgaggcaaaagaagaacttcataaattaagaaatgattttgataaggaatctcgtgagagaagaaatgagattcaaaggcttgaaagaagagtaattcaaagagaagaagcacttgataaaaagagtgaacttcttgaaaagaaggacgaaacaatcaatcaaagaatgcttgaggtagatcaagtagaagcaagagtacagaagctttatgaagaaagaagagcagaactcgaaagaatatcggctctatctagtgaagaagcacgtgagattcttctagatgaaataaggaaagaaattacacacgatgcagctttaatgataaaagatattgaaagtaaggcaaaagaagaggcagacaagagggcaagggaagtaattacaactgcgatccaaagatgtgctgccgatcatgtgtctgaatcaactgtacacgttgttgcactaccgaatgatgagatgaaaggtagaataataggtagagaaggaagaaacattagaaccttggaaacattaacaggagttgatttaattatagatgatactccagaagcagtcattctttctagctttgatccaattaggagagaagttgcgagaatggcactagaaaagttaatagtggatggcagaatacatccagcgagaatcgaagagatggttgaaagagcaactaaggacgtggaaagtagtataaaagaagaaggagagcaagcagctcttgaaactagtgtacatggactacatcctgaaattataaaacttcttggtagattgaagtatagaacaagttatgggcaaaatgtgttaaagcattccatagaagtttcatacttagctggcttaatggcttcagagctaggtttagatgttactttagctaaaagagcaggattgctacacgatattggtaaagctgtggatcaagaacaagaagggcctcatgctctaattggtggagatctagctaaaaagtatcacgaatcgccattagtaataaatgcaatagcagcgcatcattcagatgtagaaatgcaatctttagaagcagtactagttcaagcggcagatgcaatatcagcggctagaccaggcgctagaagagagacattggaagcatacattaagagattggaaaagttagaggaaattgcaaattcacatgaaggtgtagaaaagtcatatgccattcaagctggtagagagattagaattatggttaaaccagataaagtagatgatgctggaacaattgaattggcacgtaatttagttaaaagtgtcgaggaagaacttgaatatccaggacaaattaaaattaatgtcataagagaaactagagcagtagattttgctaagtaaaaaagtgaagtatattttgttaagtgatgaaatatacttcattttattatagattaagtgtaattaattcatttaaactataattgagcatttaaaaacaaaatacctagaaagaaaaatattttttaatttagtaattctaaaaggaattttaggaattatatagaatatatttaatgtaaacgatttgtgtattaaattctaggaggaataacaaaaatggaagtattaaaagtatcaacaaagtcaaatcctaattctgtagcaggtgcactagcagctataataaaggaaaaaaatattgcagaaattcaagctgttggtgcaggtgctataaatcaagctgttaaagctattgcaatagcaaggggatttgttgcaccaagtggaaaagatatagtatgtgtaccggctttcacagatatacaaatagatggagaagaaagaacggccataaaattaatagtacaacctagataattaaaattatttctaaattattatatgagcaatcatttttaagttgaaattatcaataaaaacgattatactataatagttaaatgctatatttattaattttttgtaaagaggtgtatataatgatagcaaaagaggttacagtaaaaaattcatctggtcttcatgctagaccagcaacattattagttaagaaggcttcttcatttaaatcagacgttagtatagaatataacggaaagaaagcaaatgtaaaaagcttaatcggagtattatctttagcagtaactaaagatgctactatcaaggttgttgcttcaggagatgacgaagctttagcagttgaagaaatcgttaaattagttcaaactttagaagactaatataccaaaaagggttccatattattaatatggaaccttttttggtgcattagtagtataagtattaaataatttatataagtataatttttgatatcgattactcatgcagatctttaattaaaggctaattctcatccattattaaattgcatctaaatagtaatgaaaacaaatctaaggcacctaaaaatactgcaatatagatagacctctctattattggaatatttatagaaattaattttgctatatttaggttaaacaaacctattgttccccaatttaatgaacctataagaactaataaaaaggaaagtttatctaagatacctatcttacacatatttcttcactccaatctttaatatgatccttagtatatatatatgattcttagagacaataataacaaaaatgtaaaataaatttaaatacaaaagagtacaaataattctaaaattaaataggcaaaaatgaaaaaaatatgatataatacgaatgttaaaagaaaaagcataaaatatattcgtgtggaggtttttagatgagaaatttatatagcacacctttaaattcaagatacgcatcaaaggaaatgagctttattttttctgatgatatgaagtttacaacttggagaaaattatgggtagctttagcagaaggagaaagagaactcggattaaatataactgaggaacaaataaaagagttaaaagaacatatcaatgatataaattatgatgaggctgctaaaaaagaaaaagaagttagacatgatgttatgagtcatgtatatgcatatggtcttcaatgtccaagcgcaaagggaattatccatttaggagctacatcttgttatgttggagataatacagatattataataatgagagatgctttaaatctaattaaaaataaaatagttacagttctaaatcatttgaaaaattttgcactagaatataaagacatgccaacattaggttttacacatttccaaccagctcaattaactacagtaggaaaaagagctacattatggatgcaagatttagtaatggatgttgaaaatatcgactttttattatcaacattaaagcttagaggtgttaagggtactacaggcactcaagctagttttatggaactttttgatggggatgaaaataaagttaaatctttagataaaattgttgcagaaaaaatgggatttgaaaaaagttatggagtaacaggtcaaacatacccaagaaaacttgactctatcgtattaaatacattatcagaaattgctcaaagtgcttacaaatttagtaatgatttaagattacttcaaaatatgaaagaaatggaagagccatttgaaaaaaatcaaataggatcatcagctatggcttataagagaaatcctatgagaagtgaaagaataagtgcattagctagatatgtaatagtagatgcattaaatccagcaattacagcaggaactcagtggtttgaaagaacactagatgattcggctaacaagagactatctgtagctgaaggatttttggcattagatggagttttaaatttatacataaatattgctgaaaacatggtagtatatgataaagttatagcatctcacgtgcaaagagaattaccatttatggctactgaaaatataatgatggaagctgtaaaaagaggtaaggatagacaagaattacacgaacagattagagtacattctatggctgcggctcaaagagtaaaaggagaagggttagataatgacctaatcgatagaataataaatgatgattcatttggtctatctaaggaagaaattctagcaattatagacccaactaagtttgttggaagagcaccaagtcaagttgttgagtttatagatgaatatgtaaatcctattattaagaataatgaagacgcattaaaaattaagagtgagataactgtataataatataaacgctaaaattaagtatatatataaatcaaagaaatacatatttatgaaatatgtatttgaaagctaactgttataagtgaaagttaaaatttataatctgagttaatgaatttagttaacgtattaaaaattgatttaattacaagtaaggttgtttaggattagcttgctaaatcagagttgaagcaagctggtccttgatgcaacctatttttttatgtgctttcagagttatgctttggtagtattcaggtaaacatgtatctgatttagattaatgtaatctagagtttgagatagatattgtatatcaatcgaattttaaggctctaagtgttggatacctgttaggataaatttggctaaggggataattcagtttgtcataactatgacagcaataaagacagtcaccattttgaagtctataagtaataaagccgttatgaaaataccgtcctatagatggagtgtaaaattgaattaaacagcctctatctaatgatttatcgtttggaagcttagtggctcctaattttggcgttattaagtattgatatagctcttcaactcgaatccaggcatgagtatatggtttccaagttgcattttgactaaaacccccagcatgaattatttgagacataaaattagtacaatcccctccgattccagaaaatgatttatattcaggattataatttaatgcaaatctttcagcataattgcaggcatctgtgacattaaatttggaagatcttttttcatcgtggttattagtagaaagacagctagaagctataaacatttcaaataatgaatcaattgatgaaagtttatccttatatgcatttatgttgcggttttcattgaagttaaggctatttactaggcttgataaatcagtgtttaggatatgttcatataaaagtggattttcttcattctctgctataaattgtattttgcatttgtcttgcaaatactctaaaatgagtatatattcatttattgaaactgaatttatattttgaggataattttttataataaaagaagtcttcagaattaatttaactttaatgaaacttgggatttgttctaatatattatacgcataatcaaatttatagtctttaaatgaagaatttaatttttttgcccattcaaagttgaataatttttttaggtaaatttcttttaatatggtatcatctaaattatacttatgtttagaaattaaattaagattattataaggcattgatagtaaaaaggataaattatataaactgtctgttagcatatagtttccttatttaaaattgttatcattaaatatgtttatgagggaaattatagaaatgtgttaataaattaattttttataaagttatttgtttgtactacctgattgatagtttaatatgggctttaggcatgatcaaaaaataacacagtcatttattttatatgccttaatgaattaaagttttaagaaaaatatatattaagatttgtaatgccctagattatagattaaaacaacaaaaatattcataaaaatttaaaagtagatacaaatatatttaatatgttataatgtaatatggacgaaaaaagtgatgaacttataatatttttatagagaatattgtaaatctaaaatgaaaattataaatttggtgactatacttgcaaattataattgttgtaggataaagtcaaatttgttaaagatttttataaaggagctataagaagaaatgcaagaattatctaacggaatagctagcaagtatgaagaaataattgaaaaaataaagagtttttcagatgaatatctaaatgaagattataagaatatttgtgttctagcaacagaaactttatttttaaattatgaagaacaatttaaaaaggggaagagcttttcatggggagcaggaatagtgcatgctataggaactgtaaataacttatttgattcaaaagaaaagccatatattaaagttgctgacttatataaggagtttggtgttagtagtagtacaggctctagtaaatcaaaggaagtaaaaagcttattagatatatcaaaagataataataaatggataatcggcgaaaataaggatgcagaagcttcagaaggtactatgctaaaagctaaagaagaagttgcattaactatgaatgataaaatagaagaggataaagctattaaggatgaaacaaaagttccttttaaatttgctgtccataaagattatataatggctcaaagaattattgagtatgcatggagacaaaagaattataaaaataaggcaaaatatgcaaaagaagcgttagaagtatatgaagattgtgcggatgcatatataatattatcaaaagattctagtttaaataataatcagaagacagaacttctagaaaaggcagttaacgcagcgaagaatttattaagaatagatgatttgaaaactgcaccagaagagcttcttagattaaagatagcgaggcaacttttcggagctaagtatagtttggcgattcatttatgggaaattggtgaaaaagaagctgcaatagagaatgctttagaaattttagagtatgatgagaaagatgaattggtggttagaagtttagtagtcaattggcttttaattgagaagagatatgaacaactaaaaagcctgctagaaaaatatgaaaaagataatttggcagctatacattatagtagagtagcgttattatataagattaatgaaattaaagcggcagaaagtgctttaagaagagcatataagagaaacccgcatgttataccatacatattaaaacaaaaaagagttccgagtaccttgcctaatttaattagatttggaagcgaggaagaagctatgaaatatgcaagcttaggtttagacatttggaatgatcctaagatgcttcaatggattaaagaaaagaagaaagaatttgatatcataaattttagctaatcactttacaaggataagatttcatgatattataattattgtaaattaaataaagaaatcttcggggttgggtgaaattccctatcggcggtacagcccgcgagctttaaaaagcagattcggttagattccgaagccgacagtaaagtctggatgaaagaagagagtaatgttataaattatatttaaaattaaagttttaaatgttatttgttcgtatttaagtaccctgaattaagtaaaattcagggtttttttattgcaatatatttttaagtttgaaattatataagattgatagaactggattaaaatatatgctgtaatatataggataaattttaaaattttacttgtatatataaataatcattacaatttttttaaactccgaggatttgaatcccggagtttctttatttatttacaaaaaaataaatgcttaaaaactcgtattataggaaatagtgtgaggagaaaatggagatgattagttttggatgagaagtatatggagagagctttagaattagctaagagaggaataggaaaagtaaatcctaacccactagttggagccgttatagttaaagaaaatgaaataataggagaaggttatcatgagtgctatggagaagctcatgcagaaagaaatgcagtgaaaaatgcaacaaaacctgtggaggggagcacaatttacgtcaccttagaaccttgtgcgcattatggaaagacaccgccatgcgtagatctaataattgaaaagaagtttaaaagagtagtaataggaatgttagatacaaatgagttagtttcaggaaaaagtgtggaaaagttaaaagagcatgggatcgaagttgtagtaggtattaaagaaaaagaatgtaaagaattgaatgagatttttataaagtatataacatcaaagattccatttgttattttgaaaagtggaatgtctattgatgggaagatagcaacttatagtggagaatcaaaatggattacatctaaagaatctagagaagattctcaacacttaagaaataggtttcattcgattatggtaggtgtaaatacagtaattgaagataatcctgagctaacatgcagaatcaaccatgagaagaagctaataaggattattgtagatagtaatcttagaattccattagattctaaagttcttataaataatgataaagctgcaatagtagcaacgactttgaaatcagatgaagaaaagaaaaagaaattaagatctatgggcattaaagttatagaagtggcagataaagataatagagttaatctgaaagaactggttaagagaattggagaagaaggaatagattcaatacttatagaaggtggaggaactttaaatttttctgcattggaagagagaattgtagataaagtaagattttatatagcccctaagataataggtggacaaaacagcagaagtagtatatcaggaaaaggcttctttaaattagatgaagccattagattaaaggatattaattatagaacaattggagaggacttagtactagaaggttatgttgctaaataagaggtgaaagaataaggaggagaagatgtttactggaattattgaagaagttggcgtgttagagaaatttagtataggtaatggctttagagttatggaaatcaagtgtagtgaagttttaaaggaaactagagtcggagatagtatagctaccaatggagtttgcttaacagtaaaagaaaaatattcagattcctttaaagcagaagtgatgggagaaactttagataaaagtaacttaggaaatttaaaggctggagataaagtaaaccttgaaagggcattgagattaagcgataggcttggtggtcatattgtaagtggacatatagatggtgttgggaaaatagtttccataaaagaagaaagtaatggaacttggtttactatatctgcacctgaggaggtactaagatacattatatataaaggatcaattggaatagatggaataagcttaactgttgcttatgttgatgatgaagtatttaaggtttctgttatacctcatactatagataatactatactttcatataaaaaagttaattcaaaggttaatttggagtgcgatttaattgggaagtatgtagaaaagttatttggtagaaaagaaaaagaagaaaatgaaaatagcaatattacaatggaattcctaagaagaaatgggttttaactatctaaatcataagaataaattttaagtatatataaaatataaatttagggagctgagcattatgtttaatagtatagaagaggcattaaaggatattaaagaaggaaaaatgataataattgtagatgatgagggaagagaaaatgaaggagatttagtaattccagcagaactggctaacggagaaaatatcaattttatgattaagtacgcgagaggacttgtttgtgcgccagtggaagaagaaattgcagtgaaacttggattaaatccaatggttgaaaaaaatacggacaaccatgaaactgcttttacagtatccatagatcataaggatacaacaacaggtatatcagcatttgaaagagcttatacaataaataaacttgtaactgcaagtgaaggcgatgactttagacgaccagggcatgtatttcctttgatagctaagaatggtggagtctttgagagaattggtcatacagaggcagcagtagatttagcaaaacttgcaggatttaaaggtgcggcagctatatgtgaaatagtaaaagatgatggaacaatggcaagacgtgatgatttgataaagtttgctaaggagcataacttaaagatagttactatagctgatctagttaaatatagaaaagaagaacatttaagtgtcgttatggaaacggaagctaatcttccaactaagtatgggaattttaaagtacttgcatttaaagaaaaagattcctcaaaatgtcatttggctttagtcaaaggagatattaaaaataatgatgaaccaatacttgttagagttcattctgaatgtttaaccggagatgctctaggatctagaaaatgcgattgtggagaacaatatgaagcttcgatgagaatgatagcaaaagaggactcgggaatacttctgtatatgagacaggaaggaagaggaatagggcttttaaataaattgaaggcatatgcgcttcaagatcaaggattggatacagtagatgcaaatttagctctaggatttagagaagacatgagagattacaaaacaagtgctgacatgcttaagattttaggtataaagaatgttagattaattaccaataacccagataaaatagaaggattacaaaaaaatgatataaaagttgtagaaagagtttcaatacaaatgcctttgaatgaaaatgatgagttttatttaaagactaaaaaagaaagaatgaatcatttgctaaatatttgataattaaattctaataacatgttactacatttggagtaacattagcggggataagttggatgtaatatttgtggttataaattcaattagtatttagtctacattcaaatctaattgaagttgataaaaaataaataatataaaatattggaggaaaaacaatgaatatatttgaaggaaatttagtttcagaaggattaaaatttgggatagtagtaggaagatttaatgaatttattggaggaaaacttttagaaggtgcaatagacggattaaagagacatggagtaaaagaagaagatatcgatattgcatgggtgccaggtgcttttgaaataccactgattgctaaaaaaatggctaagagccctaaatacgatggagtaatatgtttaggagcagtaataaaaggatctacatcacattatgattatgtttgctcagaagtatcaaagggaatcgcgagtgtttctcttgaaagtggaaagccagtaatttttggtgttcttacaacaaatacgatagaacaagcaattgaaagagcaggaactaaagctggtaataaaggatatgaaagtgcagtttcagctatcgaaatggcaaacctacttaatacaataggataaaccaactataatctatacttatgcgcatagctcaccgagatgaataatatacttttgttccagtttctaggtaattctgatgggtgattctaaggctataaagttgcacccaaagtgctagcctcaaagaacaagcgctcacagagaaagttcgaagaacgaaatataaaatttagattctcactttttgaactagcacatttggaatagttcaaaggaaactcgactcacttcgttcactgagtaatttcaattgaccaaatcatagatttggaatttcaattaagaatcacatccatcagaattaccaatgaaacattccacaaaagtatattgctcatttctagttggaagatattttatagtttatgattgtgttatctatatgggataatgaaaatacatcaagcttataaaaatatatgtatatatttatataggattaaaggtatatattttcaaagaaatatatgtacgcataaaaatattttcatatgtacatatataaatatttataggaaatatcagggttaaaggctacttggagaaagagggggaacgctttgcttattcaatttaaattggaataagtttaagtggaaccctctttctcttaattatttctaaagtctcatggcttttcggaattaaaatatttataattttggtaagctctaacacaagtatgactattagtcgtgatatataaaaagacaaaacaattattagtcggatttatactatgatatattattaactagaaagtggaaacgtttttatgcagcaggcatttgaaaatgagatgttaaaagttcttaattggaggttgttcaactaatgcttgtcacaatgaaattgggagcaagcattagttatgcaacctccaatttagtactttcagcgaaattttcatagtcctgcgaaataacaatgtttctactttcggtgaattgccgcataatgccatctatataagaaaagtatcacaacagtttgactatattttgcttgtgagatacacttaagttagatttgttttcagcaaaatctcgtgtttaattttttttgaattatgcgagctaaaggaggaagttaagttggccactataaaggaaatagcttctatagcagaagtttctatagcaacagtttctagagttttaaattttgatgaaacattaaatgtaagtgatacaacaagggaaaaaatattaaaaatagcagatgaacttgattatgtttcagcaaagacaaaaaaagctaagaataagaaaagcaaggatataggaattatttattggtataactatgaggaagaattaggagatccatattacttatcaataaggttagctgctgaaaaaaaatgtaatgaaaataattttaatttggtgaagctaagtgaggatagcagtattgaggatattaagaatgttagtggaataattgctattggaaagttctcttcaagtaccatagataaattagcaagtgctaatgataatatagtatttgtagatttctcacctgatgaaaataaatttgattcagtgatggcggatttaggaaaagcaacttatgaaatcttagactatttgtacagtttaggccatagaaagattggttttattggtggaaagaaattagaatgcatagattatagagatatatatttggataaaagggacataaaatataaagaatttatggaaagtaagaacatctataataataaatacatatatgagacagagaaatttacttttaaagctggatataatcttatgaaagaagcattaaaatctaaaaataacataacagcttttttcattggaaatgatacaatggcagttggagcttacaaagcaatttcggaggaaggattatcaataccagatgatataagcataattggatttaatgatcagcctagtgcaaagtatatgataccagccctaactacgataagaataccaagtgagtatttaggaaaagcagctgttgacttgctgtttgaaaatttgaatggaattagggaatataataaaaaagtaataataccaactgaatttaaaattagagagagttgtaagagaatataaaaaataagcagtagcctttttgtagaaaggggttactatttttttgctctaaaaaaatatatatagtgcaaaaataattcttcatcataatctaaaaatattgcaagaattttagccgtaattgtgaattgcaacatatatatttaaacttttgaagaattatataaagaaaaaatacaaaaagcatgttagatttttatcaccattaaatataacatgaagattaaattcgtttattgaaaaagacgagtttaatatttatatcaagctaataaaaaaatgctaataaccaaaaaaagtacaaatcccaatattaatattataaaattattacaaattgataccaataatgcaataacgtttactatattgagaatgctataatgtaaacaaatacataactaatataaattagaaaattacttatgtataaactttaatttcaagggggaataattaatgaaacttaaaaaaattatggctgcagttgtaactggcatgatggcttttagtttaatggcatgtggttcatcatcaggtggtaacaacgcttcgtcatcaagcaaaggaaaagatgataaaacaattactatatgggcttgggatgatacattcaatataaaagctgctaatatggctaaagaaaaatatctaaaggatcatccggatgtaactgttaatgtagtaagtatggcacaagatgatgtagtgcaaaaattaaatacaggtctttcatctggaacatatgatggacttcctaatgttgtgctaattgaagattataaaattcaaaattatttgcaatcttatcctggtgagattaaagatttaagtggaaagatagataaaagtaaatttatggattacaaattaaagtctatgcagcaaggtgataagacttacggagtaccatttgatagtggtgtaacagcgttattttatagaacagatttaattgaacaagctggatataagaaagaagatatgcaaaatcttacttgggaaaaatatatagaaatcggtaaagctgttaaagctaaaactggaaaagctatgataactatagatccaagtgatttaaatcaactaagagctatgatgcagtcagctggttcatggtatgtcaaagatgatgggaaaacagtaaatattgctggtaatcaagctttaaaagatgcgattaatatatacaagcaaatggttgatgcaggaattacaaaacaagtatctggatgggacgcatttatagcagcattccaaaaaggtgacgttgctactgtgccaagtggatgttgggtttcatcttcaatacaagcttctgaagaccaaagtggaaaatgggcagtagcagctattccaagaatggcttcaaattcaaaatcagttaatgcatctaaccttgggggtagtagctggtatgttctagataaggttggaaattcagatttggctgctgactttttagcaagtacttttgcatcagatgatgctttaatgaatgagttagttccagcaattggtttagtaagtacgttaaaatctgcaagtacaagtgaaaattatagtaagccaataaaattttatggagaccaacaagtgtttaaagatttatcagcttgggctgaaaaggttccatctgtaaactatggtctttacacatatcagttagaaagtgttatgtcagaaggaatgcaggctattgttggtggagctgacatagatgaaactcttcaaaaaactcaagctcaagcagaagcggctgtaagtaaataacagagataaaataaccgtaatttgaaaaatatgaatttgtaaaggctatttgttaaaaatctaaatacatgtttagcaaatagccttttataaacctcaaaggagttgaaaaaatgaaacgtaaaattggatctggtattaacagcaaagaaaacttttggggatgggtttatgtagcattaggtacgtttttaataggattatttgtgtttttaccaatgatacaatctttgataatgtcactacaatcaggtaaaggcaataatttgaagtttagtggttttagtaattatgtaagaatgttttctgatgcaacattgattaaagcagttggaaatacatttgtatttttaatagtccaagttccaataatgattattttagcacttattatttcttcagttcttaatgataaaaaattaaaatttagcggtttttttagaacagcaatttttttgccttgcgtagcatccttagttgggtattcagttattataaagagtatattcgcatcagatggtttagtaaataaactacttattaatattcatttaatctcgataccaattgaatggattacagatccattttgggctaagatattaattattatagctataacttggaggtggacaggctataatatgatattttatttgtcaggcttgcaaaatattgatcattcaatttatgaagctgcagaaattgatggggcatctccatttaaaaaattcacatctataacagtaccactattaaaacctataatattatttacaacaatcacttcgacaattggtacattacagttatttgatgaacctatgaatataacaaaaggtggtccagcgaatgcaacaactaccatttctaaatatatatatgatttatgtttcacatatacaccagactttggatatgcaacagcagtagcttatcttgttgttattatagtaatagtattagctataattcagttcaaaataggaggagataagaatgacaagtaaaatgaatagagtatttaaatatatatttttaagtgtagcatcgtttgtctccatatttccgtttttttggatggttattagtgcgaccaataaatcagtagatgtgacaagaggaaaattaattccaggaagtagctttatggaaaatttaaataatctttttaagccagaattaggctttgcttcttccttagttaattcagcagaaattgccattataactacaattcttgcacttcttgtttcatccatagcaggatatggatttgaaatattcagaacaaaagctagagatagactatttaacattttacttttgtctatgatggtcccattttcagcattaatgattccattattcaaatttttctcaaatttaaaaagttcaccattaggctttcttggggtaaatacattatgggctgtagttttacctagtgtttgtactgcatttttaattttcttctttaaacaaaatgcaaaatcatttcctaaagaaattttagaagcagcaagaattgatggattaggtgaagttggaattttctttaaaatattctttccaactatgagaacaacttatgcagctgcagcgattataacatttatgggggcatggaatgcttatttatggccattgattgcattacaatcaccagaaaagaaaactgttttacttataatttcaaagttagcatcaagttattctccagattatgggttaataatgatggctatagtaattacgactttaccaactgcatttgtattctttgttatgcaaaaacactttgttgcaggaatgactggttcaataaaataaagtttaatagaaattaaaatataagtatatataaagtttaaataatataattcattaaataattagaatctgaaaaaataagagttttataaaatattggagggaagcttgtgaagaaggaatttcctgtacttagtagtaaaataaatggatttttgcatggtggtgactataatccagatcaatggctaaattatcccgaagtattaaaaaaagatgtacggcttatgaaacttgcaaattgtaattgtgtatcaataaacatatttggctggagtgcaatagagccgaaagaaggaaaatatacatttgattggttagataaagttatgaatgatatggaagaaaacaatattcatgtaattttatcgactccaagtggtgcaagacctgcatggatgtcagaaaaatatccagaggtcttaagagtaaatagtgatagaagtaaaaatcttcatggtcagagacacaatcattgctttacttcacctgtttatagaaaaaagacatatgaaataaataaaattcttgctgagagatataaagatcatccagcgcttattatgtggcatgtttctaacgaatatggaggagaatgtcactgtggcctctgtcaaaatgcgtttagagaatggcttaaaagaaagtacgataataatttagataaattaaatgaggcttggtggactggcttctggagtcatagatttaacagttggtcacaaatagaaagtccgtctgaaaagggtgaaatgtttgttcatggacataatttagattggaagcggttcgttacagatcagacaatagatttttataaaaatgaaattgcccccataagagaaataacatctaacatacctgtaacagctaatttcatgggtaattatccacgtatgggcttgttcacaggcttagattattggaagtttgcaaaagaagtggacgtagctacatgggataactatcctgcatggcataatgattttgaaagtactgaagatcttgcagctaatgttagttttgtgcatgatatatataggtcgttaaaaggtggacagccgtttttaataatggaaagtactccaagtctagtaaattggcatgatactaataaattaaagcgtcctggaatgcatttattatcatcaatgcaaggtgttgctcatggagcagattctgtgctatatttccaatggagaaaaggaagaggagcttcagaaaaattccatggtgccgttgtagatcattgcggccatgagaatacaagagtatttagagaagttacagaagttggcgaagtattaaaaaagattaaagaaatccaagggtcaattaaagaatcagaagtggccataatatttgatgttgaaaatttatgggctattgatgatgcacagggactaaaaaaatatagaaagggctatgaagaaagctgtcaagcagcttataaagtgttttgggaaaatggaatttcagtagatattattaatatggattgtgatatatcagattataaacttgtgatagcaccaatgctatatatgataagagcaaatgttgcagaaagaatcaatgaatttgtaaagacaggaggaacttttgtaactacttatttcagtgggatagtagatgaaaatgatctctgtttcttaggaggatttccaggaccgcttcgagaagtaactggaatctggtcagaagaaatagattcactatatgatgatgaagtgaattatatagaattcaaagatgataaaattaaagaactaaagagccaatatgaagtaaaagattactgtgacttaatccatgtggaaacagcaaaagttcttggagtgtataaagaagatttttatgctgatatgcctgcgttaacagttaataactatggggtgggaaaagcatattatatttcagcaagaacgggagcggattttaacaatgatttttattcaagtcttattaaggatttaaatattaagagtgttatagagggagaattgccacaaggtgttacagctcaaatgcgttctaataaaaataataagtatactttcattatgaatttcactgaagaagaaaaaaaggtggatttaggagaagaaatatattttgatatgctttctgatgaaaaaatcagtggaaaaatcatattagataaatatggtctaaaaatactaaagcaagttaatcataataaattattagaataagaaaaattctttatgtatatatgttgcaataataaattgacatttaaaatttcaataagacaagtgtttagttaaggccagaatgtagaaattaaattgtgatatatattaaaaaattaatatattacccccaattaagataaaatcactataaataatttaaaagtttgtagtgattttatcttatttataagtgaggtgaaagaatgaaaattaacaatgcattaatttaatgctatactataaataaactaaataggtataaattagataaaatattttaaataaattataaaatgtgaaaggataagttatttatggataatagcaaaatttgtgttgtagggttaggcggagttggaggatatattggctgtatgcttgcaaagcatttttctaatgtttattttttagcaagaggcaaaagattagaatcaataaaaaataatggtttgaaattatacagtaatcttcatggagaattaaatgtacatcctaaattagcaagcgatagcgctgatgaaattggaataatggattatatttttatatgtgttaaacatttttctttggaacaagtatgtaaacaaataaaaccgatgattaatgaaaatactgtaataattccattaatgaatggagttggagtatctgaaaaagtaagaaaatttataaataatggccaagttattgatggtttaatatatatagtttctggggcagaaaaagatttttcaatacatcatgcaagttcttattgtaagatacatatagggtatggcttaaaaaacaatgatgaagtagagaatgtattaattagaattcaaaaaatattacaagaagctgaaatcatttgtaaaatagaagaagatatagaagctgcaatttggagaaaatatatattaaattgtgcttataacgtaataactgcttattataacgcaacaacagcagaaattataaaaaatgatgaagcagtcaagcaaactaaaatattactaaaggaagcttgtgctgtagctcgtaaattaaaaataaatatttctaatgatttagaagaagaacatttttatcacttaatgaataagcaagctggagaatcaacaagttcactaaaaagagatattgaagcaggaaggcaaaatgaattagaggttttttcaggaaagctaatcgaactagcgttaaattgtcaagtagaagttccgatgagtcaatttttctatagagaattaaagaaaaaaagttaagaattatagaatgtgttttattactaaaaaactataatatgttgtatttgaaacttaatatattctagaaagtttaattcataagagattactccaaactattgggcgattcaaaacaaataattttataaagaatgaattatactatttagaacttatatacaacatattatagtttttaaatttttattctttagcaatttatattcaagttaaatctgtggacgttgtgccccttgaggacataagttatggaaaaggctggttcagaaagttatggctcgcaaagagaataaaaaaagaaaatatattcgcctgcataaaataatattcttatatttagaatagttcagtattgtagcatagctactatttttataaatgcatagctgccgtttctgatgtacagatttttcctacataatttaattctctataaattccttttgagcaggtattgttactcttacagtagttcctttacctagttcgctgctgatcgaaatgccatagtcatctccatatagaagtttaattctatcattaacattttgaataccaatacttgtgaaatgttcatgctttttagaggcgtcattaagaatttttttgacttcttcagctgtcatgcctacgccattatctatgatttcacaaattaaattttgattttgttcatttacaaacacatgtatagacccattatttcgttcattaaagccatgaaaaaatgcattttcaatgaaaggttgcaaaattaattttggaattacatagttttcacaatttggcattacgaaaaaatttacattaatattatctccatagcgcatatgattaattaaaacatagttatttaaattttctatttcttcttgtattgttatcatttcatttttattactgatagtatttctaagaagcgatataaatgcatctatagtttgtatggacttttctgtacttccttgccacataagccacttgattgaagctaaagtattgtaaataaagtgtggattaatttgcatttgcaaagcatgtatttcggcttttctcttttctttctgcatttttatctgagcatgaacataattatttaaaccatctagcatataattaaaattagctgatagttcacgaacttcatagcttccgacaacaggaatatgattgttgaaatcaccgtgaattattttgggcataactttaacaagagctgaaattggttttgtcgttcttcgtattacaaagaaagtaatagcaatgaatattgatgcaattaatatgcttactgctataatttcagaagaatcatatatctcacttaacactatatttttatcaatcgtaccaactatattaaaattgtaagttgataaatgttttgataatattgccacatcagaagagcctaatttagtgttaacgtactttaggttattatttagaataacatttgatatattatataaatctaaattcttcgtccctatttttgaggaaaggctagaagaaacaatggtaccatcacttgatataatagaaatactatttccattacctacaaaataatcataatatttatgaaatgtatgctcgctgataagtacatatacaaatccatagggctctcgtgtaagtttgtcacataaaacctttatggccacaatggtactagagttctttgtaagttttgtaaagccatgatctaagtattgatataaaacagtatttttattatctaatgcttttttagtaaagctgctatttaaaacttcattagtatctataataaggcggtcataatcacttgctacataagtattaccattaatgcccacagctagtacagtaatatcataaagatctttatcagggatcattttatggaagcctgtaaacatattatataaagttcgataattctgttgtggtgtgaggtccttttctgataaatatcgctgaaaatctgggatataatcaatcgcattcataatattgattgtattatcattaaacgtattgagttcattgcttatttgtgttaaaactttataatttgatttgctgaaagtatcagcaagtgtatcttttgaaattttaatcgtaataattcctattgaaatagatactaaaataacgcttataagaacaactgaagcaactctaaaaaacaggctcgtagaatgtattgattttgataattttagcataatgaaaagtcctttcctttgttactattattaatatcttttttttctaaaagcgctaggagtgagtccggtaaatttcttaaaaactttacaaaagtaactttgatctgagtaaccaaccattccacttatatctgagataggaatatcttgttttaaaaaatcacaagctttttgtattctaattttattaagaaattcattaaatccctcttcattatgagaactaaagtaggctgataagtatgaataattaaaattaaatagcttagatacattagttaaagtaagttgctcgtcgtaattatcatgaatgtattgaataattttattgatcatatgtgaatttattttattttcatatgtgtctattatttgtttaaagcgatttaagagagaattataggccacaagtaagtcttcagaatatttagttttatctatgtcatgaaagcactcttgctttaaggaatttagcttatctaaatcgaaatttaaatattctaaagaagtaatcacattataaaaagaattttgaattaatgcttttaattcaaattctgtaagagatctttgataaatagcatttgtaacgtatattgttagcatttcgaatgcattctgaaattgcattatagaaatagattctgaaaaacgcttaaaattaaatttttctattggcgatggtgttttaaagtttgaagaacacattaaagaaacatttttgttgtaaaaatattgttgagttaatactaagaattccttttcgtatatatctttaatatttctactggaatagaagaggttgctcaatacaaaaaatgcttctttaaaactatttgaaactacttctgaaatattttctagcttactaaatagagaattataatttttatcatcaaaatttagaattacaactatgatttcgttttcaatattagcgatctgtatagtataattggcatttaatccttctaaagaaaattccttgccgatttctgaaattgtaaaatcaatgatttcatggcgtttactataattatcatatattttctttgcgtttaaaccaaataagcaaaatgattgaaaagtaaatattgtatcaaagtagttaaagtcagggtcattgtcaaaacctgatataaggcgatttaaggagctattagtgagacttaaagagttcccttctaaagtatttcttttcattttaattgaaatcttttttagagtacttaataactcagaaggatttagagaaggttttaaaatataatcaacagcaccattttgaaaagatgatttaacatattcaaaatcgctataactacttaagataataattcttatcttagggtatttgtcttgcacaaatttagctaattcaaccccatttatttggggcattacaacatcagaaattataatgtcaggaatatccttttttatcatttcgagagcttcctgaccattagaagcctgtcctataatttgaaagccttctttttcccaatcaatcatatgagttatgccttgccgcataataaattcatcatcaacaactaaaattttactatattcgttcaatagttagcacccctattctaaaattaccacaagatagataaatattgcttaatactgattataccttatagattaaaggttttcaattaaacaataaattactttagtaaagtttagtaaaatataattgattttttactaaaaagataataaaatgaaactataaatttagttaatagcataaatctaacatcagaagataggataaattaaagaagtaatgtaattgattacgaaacaaaatctcatattaatattagcccataattttttattctcatatatgtttaagtattaattaaatgtgactttataaaaaggttgcatttagttaatacgattaacaactttaatttaaaaaagcaataactctataaagtgaaagtgagggataagtatgattaataataaaccgtcattagattggctagaaaatccagaaatatttagagttaatagaatagatgctcattctgatcattggttttatgaaaaatttgaggatgttaaattagaagacactatgcctcttaagcaaaatttaaatggaaaatggagattttcatatagtgaaaatccatcattaagaattaaagagttttataaggatgattttgatataaagggatttgattatattgaagttccaggtcatattcagcttcaaggatatgataaatgtcaatatattaatactatgtatccttgggaaggtcatgatgaattaagaccgcctcatatttcaaaaacatataatccggtgggaagctatgtaacattttttgaagttaaagatgaactcaaaaataagcagacttttatttcttttcaaggtgttgaaacagcattttacgtatgggtaaatggagaatttgtaggatatagcgaagatacatttacaccatcagaatttgatattactgattatttaagagagggagaaaataaacttgcagttgaggtttataaaaggagtagcgcaagttggatagaagatcaagatttctggagattttcaggcatctttagagatgtatatttatatgcagttccagaaactcatgtaaatgatatatttataaaaacagatttatatgacgatttcaaaaacgcaaagttaaatgctgaacttaaaatgattggaaattcagaaacaacagttgaaacatatttagaagataaagaaggaaataaaatagctatatctgaaaagattccgttctctgatgagttgactttatatttagatgcgcaaaatataaacctatggagtgcagaagagcctaacttatacacactttatattttagtaaagaaaaaagatggtactttagttgaggttgtaactcaaaagataggttttaggcactttgaaatgaaggataaaattatgtgtctaaatggaaagagaattatctttaaaggcgtaaaccgtcacgaatttagcgcaagacgtggacgctcaattacgaaagaggacatgttgtgggatatcaagttcttgaaacaacacaatattaatgctgttagaacatcacattatccaaatcaaagtttatggtacagactttgcgatgaatacgggatttatttaatagatgaaacaaatttagaaagccatggttcatggcaaaagatggggcagattgaaccatcatggaatgtgccaggaagtcttccacagtggcaggcagcagttttagatcgagcatcatcaatggttgaaagagataaaaatcatccatctgtacttatttggtcatgtggtaatgaatcctatgcgggtgaagatatttatcagatgtctaaatactttagaaaaaaagatccttcacgtttagtgcactatgaaggggtaactagatgcagagaatttgatgacacgagcgacatggaaagtagaatgtatgcaaaggcagcagaaatagaagaatatcttaatgataatccgaagaaaccttatatcagctgcgaatacatgcactcaatgggtaactcaactggtggaatgatgaaatacacagaacttgaagataaatatttgatgtatcaaggtggattcatttgggattacggcgatcaggcgttgtatagaaaacttccagatggaaaagaagttctagcttatggaggagactttacagatcgtccaacagactataatttctctggaaatggtttgatttatgcagatagaactatatcacctaaagcacaggaagttaagtatctatatcaaaacgtaaaattagaaccagatgaaaaaggggtgactattaagaatcaaaatctttttgttaatactgataaatatgatttatactatatcgttgaaagagatggaaaactaataaaagatggttatctaaatgtatctgtagctcaaggtgaagaaaaatatatagaacttccaatagaaaagtataattttcttgaagaaattgtacttacaacctcattaagattagcacaagctacactttgggcagaaaaaggatatgaagtagcatttggacaaaaggttattaaagaaaaatcagatatgaataatcataattcagagtctaaaatgaagatcattcatggagatgtaaacataggggttcacggaaaagatttcaaggctatattctctaaacaagaaggaggaatcgtatccttgagatataataataaggagtttataacgagaacgccaaaaactttctattggagagcaacaacagataatgatagaggaaatagacatgaatttagatgcagtcaatggctggctgctactatggggcagaagtatgtggatttttcagttgaggaatttgatgagaagattacattatattatacttatcaattgccaacagtaccatctactaatgttaagataacttatgaagtatctggagaaggaataattaaagtaaatgttaagtataaaggagttagcggattacctgaattgcctgtactaggaatggattttaaattattggccgaatttaattcatttagctggtatggaatggggccagaagaaaactatatagacagatgtgaaggtgcaaaacttggaatatatgagagtacaccaatagaaaatctatcaaggtatttagtgccacaagaatgtggtaacaggataggaactagatgggtagtagttaaaaatcataagaatgaaggtcttaaatttacttatgttaaagttccatttgaatttagcgttttaccatacagtaacatggaattagaaaacgcacttcatatagaggaattaccatctgttaattttacacatgtgaatataataggtaaacaaatgggtgttggcggagatgacagctggggagcgccagtattacctgaattctgtatcgattcaagtaaggatttagaatatagttttacaatttctaaaatataatacgcacatataggaactatagatatccaaaacaaaacttagacttatgcaataatttaccgaaaggacaggtactctgttgtttcggttactaagaataagttgaggctttctaacatcataagttgcaccatttcagcatgctcccgagacaagctcgtgacaagtaaaaatggaacaacttatgatgaagaaatgcctgcaacatattctttaatgtaacactgcacaaaagagtacctgtcctttctgatatagcagatttttcaagctataagtatatctcaccgaaatcataaatattttgattccgaaaagctatgaaaatatcgctgaaggttctaagcagctggttgtgtgcaccttagcatgctccaactttcagtttgacaagctaaaatggaacaaaagtatgttattcatttcggcgagttatatgcataagttcaggtcttagttgttttatctataaaatgttataaattatataaatgaaaaatatctattagataaatatcggttaagaaattttagaaatatatatctattaaggaaagaaaaaataggatgctcataaaagcatcctatttttgtatcatataagtttatcgtaattttattaattagggtaaactaaatttttttcagttatatttaataagatatcgttaagaaatttatttgctaaatattttgccattggtaaattcatatctaaatagtttccacaatctttagcagaagcaccaggaatatctccttcaaattcagccataaatttatatagttctgtaagtagaggaactatatctttagatttataatcaccatgtaaaattaaataaaagcctgtcctgcatcccattggtccaaaataaactgttttatctgcataatctttatgatttcttaagaatgtagcagctaagtgctcaattgcatgcatctctgctgtattcatagttggctcaaagtttggtctagtcattctaatatcaaaagtcgtaagaactgtatcaccaaacttatcttgtcttgagacatatacaccgggaagtaattctaggtgattaattgtaaaacttgctatcttctccattaacgtcactccttaatataatttagaataaatgctcaataatatactataatagttacatctattagaaccttatttaaatttgtttctattaaattttaacacttgtaatttctattatcaataacatgcttacatattagataattatccagaaaaccataaaatatattatatgaaaaagattttatatttaatagagaaaaagatgatatttttaaatgaccaaagaacatatcagtgatattattttgataaagaattaaaaacaataggcgatagaaattataaatttaaaatatagtttgtatgaatttgaaaggagaaaaaatgaattatttagcgcacatatatctcgcagatagtagcgaagaaaatatgttgggaaatttcttaggggactttgtaaataagtctttggaaaatgaatttgaacaatccataaggcaagggattattatgcataaaaagcttgatacttttacggattcacatccagactttctaaggagtagaaaaagaatttcaaaatgtaatagacgcttggcaggggtattgattgatatattttatgatcatttcttagctaaaaattggaatgattattcatcaatgtctttagaagaatatgctgataatttttatagaatacttagaaggttttcttactgtctgccagataaattattaagaaggatgaattatattatagaagaaaactggctcctttcttacagagatatacatggcatccaaacagcagttgataggattgctacaagatttgctaatacaaagcacccattagtaaatcctatagaagagttaattaataattacgaaggtcttgaaaatgactttaaatgtttttatcctcaggcaattgattattcgaataatcttaaaataattctttaatggaataatttatagtagttagagttaatgtagagtatacaatatattttggatgttaaaccaatatattgtatatttttatgtttagaatattctagcttatcataggaaaacataattttattgaaatactaagctctaaatataggtaatttaagggtagaggaatggttttatatttttaagatgagccattatatgcgaggatattcaaaaattaaatattttaataagaatatttaaaaaaatataggcgattaaagacaaaaaatatagtattatatgaaaatcgtgttataatattgcttgtgaaatataaaaggaggtgcccttatgaataataaattgtccaaagatgcatatggcggtgtggctggtaagaactatgttccatacatttctaatggttctaagtcgggtggaaacgtttcggttttaattattggtattatattggctgttctatttgcagcatcaacggcctactcgggaatgaaatcaggacttacagttgctgctggtataccaggatctataatagggtctgggtttatagctgtatttgcaaagcaaaaaggtatacttggtaaaaatttagttcaaggtatgtcaagtggtggagaatctgttgctagtggtgtaatattcgtattaccagcaattcttttaatcggctctaaagttagtttcatagaaggtttttctgttggagcagctggagttttatttggtataggaatagcttctcttgtttacaattacttaattgttgaagaacatggaaaattaatgtatccagaatcaatggctatatctgaaacacttgttgcttcagaaggtgctggagaatcaatgaagttcatgggaattggttttggaataggcggtattataactgttataacaagttcatttttgaatttagttaacaatgttataagttatgtaaatgagtcgttttataagtggaaatttgaagttgaagttaatccgttactattaggaataggattcatagttggtatggaggtttctttaaccatgtttgctggagccatactagctaactttggaattatgccattaataggttacttctcaagtcttggaagagatggaggatctgtatggaataatcctaatgttgctataaatgctatgcaagttaaagatattgctggtagctatgtaaaatatataggggcaggaatgatgctttctggtggtttaataggcgctataaaacttattccgactataatatcttctataaaagaaactcttaatgctaaagcttcaaatagtggaaagagttcatctgttgaaaatatgatattacttggtggtataatattaggatttgtaggtggttttgtagcatctaatggtaatatagtaatggcaatacttgcttctattttatcattattcttatcattattatttgttatagtttctggtcgtttgactggtactataggaacctcaaatcttcctgtatcaggtatgactatagcttctatagttattgtgacatcattatttgttgtaatgggatggaagagccctgaaagcaacaaatcactacttttatttggaacatttattgttactgctatatcagtagctggagggtactcacaatctcaaaaggttacttttgtaataggtggagacaaaagagaaatggaaaagtactttgcaatagctggaattctaggtgttgcagtagttgttggtactatattattactttcagatcaacttgcaattactggtgataatgttccgtttgcattaccacaagctaatttaatgtctacactaactgctggaataatgtcaggccaattaccttgggtaatggtaattgctggtgttgttatgggacttgttttatttatgttaaaccttcctataatggcagttgctataggattctatttacctatatctacaactactataatattggcaggagcattagtacgtctatttatagaaaagaattctaaatctgaaaaggaaaaagaagctaaagtttcaaatggtataagcttatcttctggattagttgctggaggttctattcttggacttataggcataatattccaaatatcaggtcttgtaggtggagctgagccaagtggatttgcagcttctaatggaatggcattcatattactaatagttttagtaatagcaactgcagtaccaattctaaagagtaagataaaaaatgttggaaagtaataaagatgttttagagttagtatataagatatctgatgatttagagtatgaagtggataaagataatattgtgactatacttttaaaacaagaccataaggtccaaaggttctttagaaaacttaaattcagaattccagagtataaaaagattactttagatgaatatggaagctggatagtattgcagatagatggaaagaaaaatgtgaaagacataggagaaagtctagaagcaaaatatggtgataaggttcatccgctttatgagagattattattatttttaaatcatattgatgttaattgtcactatatagaaaaagtgaattttaaaaattaaatatgatattttattatacttgtcataaattataatatataaagctaaagccatagagatttgagtttctctatggttttaattttttgtatacaccctagaaagctctaagtaaatattttgaatattattataaagtccacgattatcattatataatgtgactatgcctcaatgaatagtggattttttattttagtgatatcaagcaattctgtttcttaattgttaatataaaatttaatgtgtttgactctaaagagatgtgttagaataaaagactatttctaaattctaatttgactgcagttaaaatttgtattatattaaaagtagatggaaaactttaataaattggtaataaaaattcaaaagtgttaacgaattcgttattggggggctataagtgaaagaaattaatatgaaatatggaagagataaaatgaaggcttttattgaagaaaaaaatcttttggagataattgaaagcaacgattttaagaagagtaagacagaagatgaaattatagctgaggcattgtataatcctattgacagcgaaagacttaaagatattgtacatgaaggtgaaaaagtttgtataataatttcagatattacaagaagttggcaaaagccatataaatttttatataaaatcgtagaggaactaaatgaaggcggagttaaagacgaagatattatatttttatctgctcagggaactcataggaaacagacaagagaagaacatcaaatacttcttggagaaaagctatcaaaaagatttgaagtttacgatcatgattgcttcgatgaagaaaacatgatatatctaggggatacaagctatggcactcctgttatgttaaataaaaaagctattgaatgtgatcatatagttattacaggagctatagtttatcattttcttgtaggctggtcaggaggaaaaaaatctatacttcctggtattgcatcatttaaaacaatatcagcaaaccattcactttccttaaatgatggatttggaagcgggacaagagagagtgtgtgctcaggtaatattatagaaaatcctgtacatgatgatatgatgcaagcagctgcaatggtgaaacctgcatttatgtttaatgtagtcatgggacctgatggaaatatagcgggggcggttgctggagactatataacagctcatgaggcaggaagaaaattggtggatagtattgacggtgtcaatataagaagtaaatcagatatagttattgcaagtgcgggaggggcaccaaaagacataaatctttatcaatcaataaaaactttgataaatgccaaagaagcagttgtagaaggaggtaccattatagtacttgctgagtgcagtgagggaattggagaaattaaagatattaatgatatgatattaaattttgacaatatgcttgatagagaaagagatcttagagagaattatactatctcaaaatatgtagggtacttcttctgcgaaacaggagaaaagtataggttaattttggtttcagaaattgatcctgatttgctgaaaaatacaaaaattattgttgttagaacgttggaggaggcacttaaaatttcttatgataataatcaaaataaaaatcttacgattaaccttatgcctcatggagcgactacgcttcccaaattagtttaaaatagtattggtcataaattgtgaaatatttaaagaaaagcacaactattcattatatggaagttagtgcttttttcttgtataaggttaaaatccaataaatataaatacttttttagcaagaaaaacacaaaggtaatataccgaaagaataagcataggaattcacatatttatataaaatatgctatagtccataagaatatttacaaacatgggcctgcttagatgtgaagattttaccaaatttttaaggagaataagagaatggggaagaaaaactaatttaatgtattatcacagcatatatgaggtttgttgacggttactaaaagtgctataattatgtataacaggggatgacaaagggggaaagggttgtaacaaccgacggtattatgaaaaataaggttttagcacttatattagcaacagtaatcactacaagtagttcaatagctgcttttgcagcacctgataatgcacagttggatgcttcaagacagaaatatgctgaaatagaaaataacataaaagatattgaaaataaaatttatgatttagatactcagatggagccattacaagcaactgtggataaaaataaaatagagatagataatattaataaaattactgagaagacaaaaaaggatattgagcaatacaaaaaagacatcaatgatttagatctagctttaggacaaagagttaaagttatgtatgcatcaggagatttggaatttaattacttaaattttgttgttaactctgattcaacaactgaatttttctcaagactacaagctgttagtaagattgtagggaaagacaagtcttacatagaagatatcaataacaagaagaatgaattaaatgctaaaataaagtcattagacgataaaaaagcagaaattagcaagcttaacaaagagacacaagataacttaaatcagctatcgcaaaaaaagaaagaagaagaaaaattagctaatcaggctaaggcagaaaaaagtaaatttgatgaacagtatttatcacaacttgaaagagaggctgtaaagtatcaatttgatgtaattgatagttcaaatagttcatcaacagagattcaaggagcagtgaaccagttaattagtattagggatagtcaaattaagagcccaattgttactaaggaaatcaatgataaaatagaaaaaggaaagacagccgcggctaaaaagaagcaagaggaagataggattgctgcagaaagtgtaaagcaatcagtagtagcttcaaatgtacaatcaagcgtcaaatcaaagactagtcagaaatcaagttcatctgtagctgcgccatctggaggtagtgcacaagcagttcttaatgaggcatataagcatttaggagcatcttatgtatggggagcaacagggccaagtacatttgattgttcaggatttacagaatatgtttatgagcatgctacagggatagatatttcaagaacaacttatacacagattgatgttggacgacctgttagtgaggatcaacttcaacctggagacttagtattccctcatgctggacatgttggaatatatgttggaaatggacaaatgattcatgcgccacaaacaggtgatgttgttaaggttggtccagtatataacttttacgcagcaagaagaatactttaaagaagcttttatattggattagagtataaggtaaaatataaattaatttagactatataataaggatagaaacttggtgattctatccttattgttttttattctatataactgctcatgacggcaaagccttaacaaagtataatgagaatattgaaaagcacaatacgtaacttaaccacagttgcctgccaagtttttctcacatgagttcgaaaaggcagatgcgtgaaaaaaatcttcggctccacagtcgcctgtgatttttttatgctaatatgcattattggaataactgcataaaaattatatatttaagtcagaacgggagggatttatatgagaatagactacaaatatttatatattttcatagctttatttttaactgaagtatatattggagttttcatacatgataatataattagaccttttattggagatgtattagttgtatgtttaatttatttttttatcggagtgtttactaagaaggtttcaccaatacaggttttcatatttgcatgcttaattgagattggccagtattttaatttggcttctcttttgcacatggaaggttttaaaatagctaagataattattggatcaacttttgatttttatgatataatttcgtattttataggagcaattcttatatttatatataaagccatagaaaaaataaactgtaaaaattaaataaatattttagagaaaaaatataaccacccactaaattgtggacagttatatttaaacatttagttaatttaatagtgctattttggagttctttttaaagttgtatggtcatatttccctataaatagagggactttttcaacatcaacatcactattctcaagaccaaaccatttggttggagaaacagtatatctttttataaataattttgctttaagtatgagttcttcccagaaatttaaatctgtttcatacgaaagctgctcttgaattaaaagaaaacggaaatcaccgacttttctatctggcatagttgtatagtttctagattgaatctttatttcaccattttcaactaactcagttgaaatttgtcgtagaaagacattcaatttttgttctactctgaatccaagtcttatttgaactcttacaatatataatgttcctagagtatctactgaatattctgctacataaggctcatcagtaacagcaatattaacaaaccaataaacatctgcttttttaggccttttgtctaaaatagaatacattatttttctttcgatttgttcaggatcatggctactggttaaacatacaagatttgttgtatacttaggacgatcgctatcttggcgcaattgattaagttgggtcttataattttcaattggcacatgttctaataaacgcatcttaatataataacctttgatccaaatgtacataatgcttaagattgcaaaagcaattaaagcagcaataaatcctccgtgagtaaatttgatgatatttgcaatgaagaaagagaattcaaatgcactaaagaaaacaagaatcaatacggcaacaatgagtggtgtctttttctttaataaataattaaataaaagaattgtagtcattaacattgtaactgtaattgataatccataagctgcttccattcttgcggaatttccaaagtagagaacaattccaatgcagacaatccataaaaatttattgattgaaggtatgtaaagttgtcccttagtgctagatggatacataatatgtaatcttggaaataaatttagcttaattgcttcagaaacaagggtaaaagagcccgaaattagcgcttgtgaagcaataattgccgctaaagttgaaagtattataccaaaaattaaaaaagaagacggaattacttgaaaaaatggatttaagccttccatattagtaaaagttggattattcctagctgatagtaaccaggctccttggccaaaatagtttaatagcaagcatattttaacaaatggccaagagccatagatgttatatttaccaacatgcccaagatctgagtaaagagcttctgcacctgttgttgctaaaaatatgctgccaagtatgaaaaaacctgctttgttttcgctgctaaaaagagtgttaattgcataatatggagatagggcacgcaataatgtccaattgtgcgaaataccaataattccccatatggctagcgcagaaaaccagacaaacattattggaccaaacatttttccaattaaatcagtcccaaagtgctgaatgaaaaatagagcacttaatatgattattacaattgtaacaatatcaagctgactaccaaagagagcgctaaaacttggaattaaatccaatccttccactgctgaagttacagttacggcaggagttagcatcccatcagctaacaaggccgatccaccaatcattgctggaattataagccattttgcacgatttcggactaaggtaaagagcgaaaagattccaccttcgccattattatccgcatttaaagttataaggacatattttattgttgttaaaattgtaattgtccaaaaaattagagataatgatccaagaataaagttttcagatatattattcaagcccccattaccttcaataattgatttcattacataaagtggtgaagttccaatatctccgtaaactacacctagtgctataagtattcccccagcactcagtttcgaaacatttccatgttttgtagttgatttcacattaatcatcctttacatcaaatatagttatacataattcctaaaattaaataaatgaaatttaaatacttttaatttgcttttagtatgtaaagtaggtaaattgataattattttaagaataattattataataacattgttaaaaaatattagtcaaactattaaaaataagataatataacaaataacgctaaatatataggattttagcccttatatgaggatttagactaatattgataagaagtaaacaatagtctatcggcttatgagtttattatgctgtaagcataataaatatatttatagaaataataaaaacgaaatgatttgctacagaaatttatctctataaaaataatttacccaatttttaaaaataaatcagagttcggggagataaatttatgaagaataagccttatgataaaagaaacagtattagtagtttaggaagtgatttgactacaacaattcaaaacttccattattctggagaagagattaaaaaaatcagtaataaaaagaagaataaaattgagagataagtggttttctttgaaaatgctttggttgaaaacgtatatatctagcaaaataatcattcatcataattctaaaaatattgcaagaattttaggtgcaattgtgaattatgaaatgtgcattgtgaattgcagaatattatttaaagaagattatcttaaataattctttagaaaggagaatttaactaatgagtagaaatagcgaaggcaataagtttaagaatattatgagtgttggaaatttcactaaacatgcagtagaaaatttcgaagaaaatatagtaaatcaaagaaactatttagagaaagttaaggaaaatgaaaaatctagagaaaatgaatagttccaattaggagactaactatatgaagtcaatataagttaataaaaaaattatattttttagtcaataaaaaagtgcatgacaaataaagcaatcacattgcttggaaaattaagaaattaaatttgtgaaacaaatgaagtattggtttttaaaagataaaaaataacacgtattagtttttttgctacatggctcatagcaatatagtaatgcttgccttcactttgcttctttgcaagataatccccaaaagtggaatcacgcatagaaacagttctagatgctgttaatatagcccaacgtaagtaggtagaaccacgtttaaccataggtgtatgtgtagcattatattttccggattgatatgttgatggatcaagtcctgaaaaagctaaaagctttgctggatcagtgaatctatctatatctccaatttcagctagaattattgaggctagtgtataagagattccaggaatactcattaaaggagagtctatttctataacaacatcctttatttgcttatctaaagcatcaatttcagcttgaacagatcgaattaacctaataatttgctgaagttcaaaagataaagaacgtgtgctagttccgatagaattgctagctacttcctttatttcaatagcttttgctctactatatttgcctttagtggatttaaccagaaggtttgtcaatttagttaaatgacaattggatatttccttcgggctcggtaactccgataggagagcataaacagagacttgatgaatagaccaaacatactttggtaattcgggaaaaattatatctataagtctagtaattgatagtttaagcctagatctataaccaattaagcgatatctatgtctagttagtgactttagctcttgaatttgatatgatacaggtgaataggattttgtatcatcagagaaaagcattttagcaataactagtgcatccgttttatcggttttagttttcctaagggtttgagccttacggaaaagatttgtagctaaaggattgagaatggataggtgaaagcctttagcatacaaatagttttggagattagtgctataatgacctgttgattcaagtcctatttttacgttagaaatatccttgttaggtaggacggaaagtattgaagaataaagtaattcaaaaccttcacgtgaattggatatacgtaaagaatcattaataataacaccatctgaatcaataatgcagcaatcgtgtttagctttagctacatcaatgccaatataaatcataagaacaactccttttttaatttagtccgctatgctccacgtagcttcatgctaaatgtatccttgctctatataaaacgtcatgcgttatctaactaattaacaaataagcataaagctgtggttatatcctcaattgaaatagtctagctataggtgaaaaaactaatccacagcgtcttatgttaagtatagtaaaaattattaagaaaggaaaagtataatgaatttttactacatgttcattatacaaggtgagaacatggaaaatatactaggttattatttaatgccacatccgccaataattataccagacataggtaaaggtgaagaaaagaaaatagaggaaacaagtttagcatgcaataaaataggaagagaagtagcagatattaaaccagatacaataataattataacacctcatgctacaatgttttctgatgcaatatctatatcagacgaggaaagaatttcaggagatttaagccaatttagatgtacaaacataaaaatggatattcccatagataaggagtttaatgtcaagcttggaacagcatgtcatgtagaaggaattccgtcagttcttgcagattcggaattattacgtagatataatgttaattatgaattagaccatggaagtatagtaccactatatttcattaataaatattataacgattataaattggttcatattacttactcaatgataggagatattaatttatataaatttggtatggagataaaaaatgtagcagaaaaattaaatagaaaagctgttattatagcaagtggagatctttcgcataagcttaaagatgaaggtccatattcgtattcgccatatggagaattatttgataaagctcttttgggtaaccttgaaaaaggagatgttttaggcgcttttaatatgaataaaactatgattagtgaggctggacaatgtgggctaaattcagtttatatacttcttggagcaatggaaggtaaagaaataaaaggagagattttatcgtatcagggaacttttggagtgggatatggagtaatgaaacttagtagacagaagcaagatagagactatttagacgagctaacaaaatataaagaagaacaattgaagacaaagctaaatgagagcaatgcctatgtaaaacttgcaagagaaaacctaaatcattatttttctcacggaaaaagtatagaagacatttctaatttaccaaaagaactattaaacgaaagacatggcgtttttgtatctttaaaaaagtttggtaatcttaggggatgtataggaacaattgcaccaacaacaggttctgtgggtgaggaaataataagaaattctatagaggcagctatgagcgatccaagatttccagaagtttcagaagatgaaatggacgatattgatatatctgtagatgttcttatggattcggaaccatgtaataaggaagatttagatcctaaaaaatatggagttattgtttctttaggaatgagacgaggattattgcttccggatcttgaaggtgttgataccatagatgaacaattgcaaattgcatgtgataaaggagatatagattttgatgaagactataagatagaaagatttgaagttgtaaggtataaggaatgataaacaataaatttatttaaagttaaagatgttataagagatactgcaaaatagtaattgcatggttttcacccccttaaataagttaagtaaaatgaaattttatataaacaaaagttgagtgaagttagttttggtagttacgatgaggatgttattctatgctttttgtatattatatgatggatagcatattatgttatacatttttgcctgcaaagaacaatcatttaagcaggttagatagtatagttttaaaaatcaaagatatttatttatgaataacttatactttatttaaagaaggtgataaatagtggaaaaaaagataccgttttatgaggaagttaaagataaagtaagatgtagaatatgcccacataattgtttaatagatgaagagaagtttggaatttgtggagttagaacgttgaaatctaaaatccctattgctataaattatggagaagtaacttcaatgtgagttgatcccattgagaagaaacccttatatcatttcaaaccatcaaaagatattttatcaattggaagctttgggtgtaatatgacttgcagcttttgtcaaaattatgagatatctcaaggaaagccacagactcaatatataagcgttgaaaaattaatggatattatcccaaccatagaaaacaatattggtattgcatttacttataatgaacctttcatgtggtatgaatatatgtatgatgctgcaaagggcataaaagagaataatactgatacaagtgttgtggttgttactaatggctatatcaatgaagagccgcttaagaagcttcttccttatgtagatgccatgaatattgatttaaagggatatacaaatagatattataataatatttgtggtgcgaaacttgagcctgttctagaaactataaaaaggtgcagcgaatactgtcatgtggaaattactactttacttgtcagtgaagaaaacgattctttagaagaagcaaggcaaatagctgaatttataactagtgttgataaaaatatacctcttcatttaagcagatattttccaagatacaaaatggagaatgaggctacaaaaatagaaaagataacagaagcgcaaaatgaagcaaagaaatacttgaaacatgtgtatgtaggaaatgttcaaggagtggataataatacttattgtgataattgcaatgaactgcttattgagaggaatggttattcaactactgtatttgtaaaggacaataagtgtcaaaaatgcggtgaagaaataaacataatattgtaaaataggatttatattttacattataattaaagcaggagttttaaattctcctgctttaattataatttgctagtaactgtaaatggattgaatttgatggcaccattatattgatatgggtaaaattgctttaagtgagaaagataatttatccattgagaagttaaggccttatagactctgcaaatatccccctttatgtgagtagaatcatcatctgtcagtgttttgtattgtaaaaatattatttcatctcttaaatgcattagagacataagtaaatcggcaaaggtttcgtgctctaatatattctcattacttataagattagataaaatatctctactttctaaaactagtttttcaagtctaggataattgattttttcaaatgctattatatgttcataagattttagcttattattagaagtttttaagtccgtaaaatctaaatttaaatattgtatattcgcatcaccagctactattatttctaatagagtgaaaccaatatcactaaaaaataatccaactaacatatttaatttgcttaaacgttcaagtttagtacgtctttctacaagcttctcaaatactaaggttacgactaatatatttataggtataaaacagaggctcataaaagagtaataaatcgtgttttctaattgaccaaatactaaataatgaataaaaaacattatgaatgataataaaattaaaataaatgaaactaataaataacgtgagttcgatggaaaaatttaagggataaaaaatcccatcaaaatgttttattatataagtgcgaccaaataaataaaacaaaggatgggattttatgcaaaacttattagtagaaatattttatgatgtagacaatttttgtattggatttgaaaattactgtaaaagtcatttcctaacggaaaatagcgaccgcaaatttgcaatgattaaaagtaaaactttatcattaagcgaagttatgacaataactatctactttcatttgtcaaattacagaacttttaaatcatattatattgagcatgtgtctactgttctcaaaccgtattttcctaagcttgtgagctacaataggtttgttgaattaatgcaacaatcattagttgcactactattatacatgatgaaatttagaactggcaagtgcacaggaatttcttttatcgattctacaactttgaatgtatgccataatagaagaatacactctcataaggtttttaaaggaattgcagaacgtggtaaaagttcaacgggctggttttatggttttaagcttcatcttgttgttaacgataaaggggatattctctctttttatctaactccgggaaatgtagatgatagagaaattaagactatagaaatattagcaaaagatttatttggaaaactttttggtgacaaaggttatttatctaaaaagatctccgatattttgtattccaaaggtattcagcttataacaaagataaagaaaaacatgaaaaataaattaatgttaatggaggataaaattcttcttaggaaaagagctatcattgaaacaataaatgaccaactaaaaaatatatgtcagatagagcataatcgacatagaagttttactaattttgcggttaatatagtttcaggattgatttcgtatagttttcttcctaagaaaccttctcttaagttggacaagtatctaactatggaataattggaatatcgaaccacaagattacaaggatacttttttgctttttttcataaccatatttacccataaaatattctagcttttcgaactcacgttaaataatgtgtaatatttttcataattgctcctttaatataagaatttatatagataacaatagcatgtctgacaagttaagacaattatatttcaatattagaataataatcgtttgattgcagtattatgtcatatattggatttaaattgagttatatgataaaatttataaatattatattttgtctacaattcatgtagatgaaaatcggaggtaagataatgagtgagaatgagtttgagcagtttttacataccaacataccaattacagaggctatgggtataagtgttacagagtttactaagtcgagagttatacttgctgctaagttaaaacctaatataaatgataaattaacagcgtttggaggaagtataaatactttgatgacaatatgcggatggtctatggtttttgtaaatattaaagaaattgaccccaaggctcagatagtaattaaaaaaagtaatataaattatagagctcctatacgtgaagattttgcagcagaatgtgagattttgggggaggaaacaagaagagaatttctcgaaacatacatgaaacataacaagagtagattagatcttaaggttgttattaaaaataaggaaactgttttcgcagagtacgagggacaatatgttgtatttaaatagaataattagggctaaatttacaagtataaatagatttattatggaggaataataatgggaataaaagctatgcatcatgtgtgcattcaaaccaatagttacaaagaatctcttgaattttataaaaatattctagggtttgagattgtagaagagacaaagaatttccatactagagattataatacatggttaaagctaggaacattcatgattgagctacaaacaagtaagaaaggggaaaatcttacaaagtggaataagtccagcgaaggaatagttcatatgtgctttttagttaataatgttcaagaagaatttaataggattaagaatttaggttataacaattttagggttaaaaataatgaagtaatatataaagttgaggatagtttcttatttaaactaaagtctcctgagggcacagaaattgaatttagagataaaaatgaaatataaatttcattttaaaggaactctgtaatgatatagaaacaaatgtaataaaggtaaagtgcatctaagagtccattctagcaactaagattctaatagttaattatgaatataattatttttgtagttaaaaataatactctatcatgtttgtttgaaaatattaatagcaaacgctaacttatattcatatcttacctaagaataatagttttaggtggtatgagtgagaaaaagctttggaacagtcttaaattgtattgacggaaggactcagattccagtaataaattggataaaagaaaattttgatgtggagtatgtggatttaataactgagcctggaatggataagatagtgtcagaagggaatccgttttattcaagtagattaaaaaataagattagtatttcagttaaagctcataaatccaaaataattggattggtaggccattatgactgtgctgcgaatccagtggatgctgaggtgcattatagacaaatagaagaagctacgaatttaattaaaaattggaatttttcggttgatacaatagttggtttatgggtagatgagttttgggaagtacatgtcgttagcttgtataaaagaatttaaatatagaacatatataaattaggagcagatgttacttaatctgctcctgttttagatgcacaaatatatttagtacaaagatttaagatataacaagtataaacgtaagcgtaaaaaaattaacggatagaaaatgcaatcctccattgttaaaattagcatagattttaacaatggaggtttatttatatgaataataatgaaaatataaattggagagaaatagttgctggcttttcttcttacgaaggaacgttaggaaatttctgcaattcaaatcacattactaaaagtcaattctattactataaaaagaagcttaataatgaaaataataatttacagtttcatgcaatttctatgaaagaaaaaagagtaagaactgagattactgtagttcaagctgatagacctaatataataatagaaataggagtagctaaagtacatgtaccggctaatgaaatagctattttaagtaatttacttaaggatctgattacaaatgttcaatcttaataaagttaatacagtttatcttgcatgtggtataacagatttgcgaaaaagcattgatggactagtagttatcgtgcaaacgcagctaaagctggatccgtttgaaaaagccttgtttgttttttgtaataggcaaatgaatagaattaaaatcctccactttgatgaaggattctggctatattattttcgacttgaaaatagtaaattgaaatggccgatgactccagacgaagctcttaagattaacaaagaagaattgaaatggctacttatgggatatgaagttagaactaagtctaaatttaagccaattgaagtaagaaacagcttttaaagcaaatattgctataagcccttaattttgaacttttacaagtttcggaattaagggctttgtggtaatatatgcctatatttgttgtgaggtataaaaatggatattttagatttagagaatcagctcgatgaaaaaacaaaattattgatttctaaaatggaagaacaaattcaatcaaaagataaagaaattgataatttaaaaaaggaattagcttttcttaaaggacaacttcttaataaaaacagaaaaatttttggacaatctagtgagcaagttgattcaagacagatatctctttttaatgatgctgaaaaagacagtgatctaaaaatagaggaacctaccattgaagaaattacatataaaagaaagaaatcatcttctcattcagggaaaaaagataacttatccggtctagatagagtcataattgagcataaaattaatgattccgaagcagtttgcgataaatgcggaaataatttagttgtaataggcaaaaaatcaaaagagattttaaagtataagccagcagaactttacatagaggaacatatttcgtatacatatgcatgcaaaaattgcgaagcggatgcagataaagtcaatataatttcagcaaaaataccaaatacattcttatataaaagtatggcttcaaatgaattattagctcatgttgtgagcatgaaatatcaatatgcaatgccgttatatagaatggaatcatattttaagatgatggatgttaatctttcaagacagacattatctaattggataataagttgtgcaactgagcttaagcctgtttttaactatatgaaagaggagctcttaaaaagaaattatatacatgccgatgaaacatatctgaaggttattgaagaaaacggaaaagattctaactcaaaaagattcatgtggttatatcgctccggaggcattgaaaatccagtaattctatatgattatcaaaaaacaagatctggatcttgtgcagaagaatttcttgaaggattctcaggctatcttcaaacagatggatatgatggctataataaggttaaaaatataaaaagattatattgcatggctcatattcgaagaaaattctttgaaataatatcatcattaagccctgaagctttaaagcaatcacatgcattagaagggtttaattattgtgagcaactttatgaaattgaaaaagagctaagggaacaatacatggggagtgatgattattatactgatagacatataataaggctcaagaaatctgcccctatccttaaaaaatttcaagaatatgtagatagtgaaattgttgatgctcttcctaaaagtcctttaggtaaagctcttgcatatgcgcaaaagttattgccatatatgagaactttcttaacgaacggatgtcttgaaattgataataatgcagccgaaagagctataaagccatttgtaattggcagaaaaaattggatgttttccaagacttcaaaaggcgcatcgtcaagcgcacttctttatagtattattgaaacggctaaagccaatggcttagcaactgaaaagtatttagtatatttatttgaagtgttagcaagttcggaaattaaagaaagggacatactagaaaaatgtatgccatggtcggaaaacattccagatcaactgcgtgtcaagactaccaaataattaatttacatataaaaatatacctaacagagaatttaaacttttctgttgggcatattttatcacttaaattgcgctatcgctacgcgtcgattctttgacgcttacgtataaactaaaaagtttatataaagaaatatcaatgtatcatttttgaattttataggcgacttaagcagaaattacaaagtatatttttagtacgttagaagagaatatattttgtgaacaataaaataataaaggaggaaacaaaaatggaagcaactatgactagaaatgcaaattcattaatatcagaaggaaatccaatgcaatattgcattgatgcttgcagcaaatgtgtacaaatatgtgaggaatgtttaaacttatgtttacaacatagtgatgctagagataggatgtattgtattaaatcacttcaagattgtgctgaaatttgctcaacaacagcttgttttatttcaagaggaagtgggcatataagagaaatagctactgtatgtgctgcagtctgtgaaagctgtgcaaaagaatgcggaagattcgatgatgaacattgtcaaacttgtgctgatgtatgtagtcaatgtgctagcgaatgtagacacgtattaaatatgtaaggcattgtttgatttaagttatttcttattttaaacataaaagtttggaaagtattaaaaatcgctattttaaagattaatagcgatttttaatattttacataactaattcgataattattataaatgtatttggtagcagattaaaaaatggacaaattatgtttttagtttctttatgtagattttaaaagaaaattaacatttaataagataaaattggtgaaatatgtattgacaataaaagaacgttcgtttattatagaaatataataatagaggtgtttaaatgagaaggaaagacgatgaaaagcaaaaaaacataaaagaagcagttattaaattaattcttaaggaaggctttcacggtgcttctatttcgaagatagcaaaagaggcaggggtatcacctgctacagtatatatatattatgagaataaagaagtcatgttacaggacatatatcttgaatattctgaagatatttttgattacatactcagtaaacttaacaataatatgaatggtcagcaagttatcgaaattattgttaaagagtattttatttatattaaggagcatggagaagtctttcattttgtagatcaatttgctaattgtccagctttgtcaaatcaatgcttgaccaaaagaggaatagataacctaaataattttcttgatgaaatgaaagaaagaaaagtatttaaaaatcttcaaaatgataatttaagagcaatgcttttttatccagtaaaatcaattgctattaattcatgtattgaggaaaatgaaaaaattgagttgctaaaggaactcataagaatagtacaagacgcattacttatataattaaaagaactgttttttagtgcgagagattttgtgaatatataattgcagaagtatctcgctattgcttaaccaatctttaaatgaatgctcgtttaagaatgttctaataggaaggatgattatgatgataaatttagataataaaaataatatgggaagagtaattcctgtgtcagatatagtgctattacctggaatgtaccatacattaaaatttaataaatttagtgagactcaaattgaaagtttatcagatgaagatatagttaatattgcattacctttaaaacaaaactttggtcaaagtaagttaaaggaagaagattttcatagagttggtgttacatttcaagtaaatgcaattgaaaaaacagaaaagggatataaagcagaaattaaaatattagatagagttgaaattaaaacattcagtattgaggaagattttattaaagctgaattcgaatttgcacctgatattattgatcttacagaaaaaagtaaggatgaaatggtagagtatattaaaaaagttactcgtgaaattagtgagaattttaagggctcagaaaagtttatgttggctgttgaaggtcaaaaagatttgaataagcttatgggatatttatctcatttcatgcaaatttcaagtgaggaaaaatatgatttgttggaaactcaatcattaaaggatagaggtcttaaatttatagattatttattgaaacaaaaggaatctttaaaattacaatttgaattagcagaaaaattcacagaaaaagctaataagaattatagggaaacagtattaagagagcagttaaaagctattcaagaagaattaaatgaaggaaaaagctcagcttctaaaaaggacaagaactacttaagtagaattgaagaggcacagatgccagatgagataaaagaagttgctttagaggaattagaaaaattagaaagccaaagtccaaatagcgctgaatacaatgtgattaagaattatttagaattattaattcagcttccttggaaaaaacaagaatttaaggacattgatttggaagaagcaagaagaatattagatgagcaacattatgggttagaaaaagttaaagatagaataatacaacatttagcagttatgcagcttaaaaatgataaaaagggttctattctattattagtaggtcctccaggagtaggaaagacaagcttagggaagagtattgcagaagctttaaacagaaaatatgtaaggttaagcttaggtggagttcgtgatgaggctgaaataagagggcatagaagaacttatgtaggtgcaatgccaggaagaattattcaaagtataaagaaagcaggagaaataaatccagttatggttttagatgaagtagataagttaatggctagctataatggagatcctgcaagtgcattattagaagtattagatccagaacaaaatgatacttttactgatcactatttagatgtaccttatgacttatctaatgtattctttattgctacagctaactctctagatactataccaagacctttactagataggatggaagtaattcaaatttctagttatactatgaatgagaaattccacataggaaagaatcacttaataccagcagttcttgaagaacatgggttgaatgatactcagcttgttatagaagatgcggcattagaaagaattataagtgaatatactctagaggctggagtaagaggacttaaaaagcaaatagcaactattgcgagagttgcatcagaaaagattgtatctaataaggtagaattaccttttaaagttaaagaagatgatttagaggacttgttaggaagaaaagtttcaagccatgataaggctcaagatgataatgttccaggagttgtaactggattagcttggacatctgtaggaggagaaatacttttcatcgaagcgacaggaatgctaggaagtggacaaattgtcttaactggacagctaggagatgttatgaaagaatccgcacaaatctctttaagtttattaaaatcaagattgccaattaatgctataaactttagagaaagagatattcatattcatgttccatcaggatctgttcctaaagatggaccatcagcaggaattgcattatttactgcacttgcatcacttgttacaggtataaaagtagattcaaaacttgcaatgacaggagaaataactctaagaggagctgttcttccaataggaggacttaaagaaaaattattaggagctcaaagagctggaattacaaaagtactaattccaaaggataatgtagttgatttaaatgaggttccacaagaagttaaggaacaattaactattatagctgtagaaacagtagaagatgttctaagagaaactttgggaatttcactaccaagaatagagcatatatttaatcctaataaatttattgaaggaactttcaagccagcagaagaataagaaatattaagagatgttgttaaaactacttattaacgagtagaagaagcaacatctcttcttgctttttatgaaaatggaaatataaaaacttcgaattataaaaagtaatgacatcaatggatcgataagtgtgagatggttaaaacctgccttttttattaaacgcaataattttatgatttaacaatgctattaaaaatcatacctattactattagtactattcctgctagtccaacaaatgttggacatttatcatgaaatataaaaactccacctataagagtaaatattacttcgccggattgtgttgattccacgacggctaatttgtgtgtatcattacttactgtatcggttgctttaaaaaataatattgtagcaataatccctgaaaaaatggcaacgattaaggattgaagcacttgccctttacttggcatacctgcagacaatacaccgaatattgatattaatatccaaaatggcatgctacataaagtcattccaaatactctttgaaaggtattaaatctgtcattgcagacttccatcatcttgcgattaccaagtgggtaagcaaatgcagctagtataactgggataattacagagattatttctgaaaaagagacactttttgcttcttcaaactgcattaaaaatatacctagtaatattaaagaggacattaatagagattttttgggaagtgtattccttactttgcatattccagtaggtgttttaatacttttaaaaaataatggagacataagagcaccagcaactatggttaattgccaagttccagcaaccagccatgatgcaccatatgtagatgcaaagcttaagggagtgtaaaataacccaaagcctattgtgctccaagtaatccattgaatgggtttattaattatatcatttaatactggatttaattgtctatttataatcataataataagcaagagtggtagcataaatatataccgtagagatgaactccataaaaaacttcctcctgaaatattcatttgttgatttaatataaatgtaaatgcaaagaaaaatgatgctgcaattcctaatatgagtgcttttgtcatttaaaaaactccttacctaaaatatttaaaattaagttgtaaattaaattagtaagatatgttatattatatacatgaacaatattttgtgcaatatattataatatatatgttatagcatacgatatttttaagaaaaggagtagcatatgagaaatttaaattcgattattgggagtaaattgaaggaaatcagaaataagagagaattaagtttagatgaagcggcaaaattaactggagtcagtaaggctatgttaggacaaatagagcgaggacaatcaaatccgacagtatctactttatggaaaatttcaactggattaaaggtgtctttttcgttctttattgacgaagagcaggatgaattagagatagtagatcaaaataatattgatccgattatagaagacgatgctagaatgaagttatatcccatatttccttttgatgcaaataaaggttttgaaatattcactatagaattagaaccagggtgcaatcatatatctactccacacagcgatggcgtcgaggaatatattatagtaactcaaggtgaagtagaaatagatattgaggatcaaaagtattcgttaaaaaaaggtaattctattaaatttgtagccaatataccacataaatatagaaatgtgagtagagaaccggcaatatttcaaaatataatactttatttcaggtaatgaaatatccttgatcaatattgtttcgatgagaaaaatatatagtaaataagttgcatttttgagattccaaatgctatctaatattaattagttaactatattatagtgaaatgctataatatagaattagataatgataattaagaattagattttattcgaaggataagaattaagcgaaagaggttgattgaaatatgggaaaattaagagtaataggtataggacctggaagtgttgagaatatgagtctgagagcactaaaggcaattgaagatagtgatgttgttgttggatacaataagtacatagatatgataaaagacttagttaaagagaaagagttatattcgacaggaatgaaaggtgaagaagctagatgcaaggaagctttaaatttatgtaaggataaaaatgttgcattaataagtactggtgatgcaggtatttatggaatggctggattgatacttgaacttaaaaaagatgaggatgtggagataattccaggtattactgcaagtagtgcagcaggttctgtagttggggcacctcttatgcatgataattgcaatattagcttaagtgatctaatgacaccttatgaagatataaagaagagagtaaaacttgcagcagaaggagactttgtaatatctttatataatcctaaaagtaaaggaagacctgactatttaagagagtgtattgatataataagggagtttagaactgatagcactccagtagcagtagtaagacatgcacttagagaagggcaaagttataaattatttactatcaaagattttgatgaagatattgtagatatgatgtctattgtaatagtgggaaattcaaaaagttattataaagatgaaagatttataacacctagaggttatgaaaataaaagatagagatagtttgtatttaggcatatgaaagaaaataatgagttgatgatgcactacataaattttaaataaattagcatggttggctcattatttttttaaatgtgtcttagcaatttggaatggagaaattatgattggatttattttaggaacttcagaaggaagaaaaattttatcgttaataaataaatacactagtgatattgctgttacaactgctacagcgtatggaggagagttactcaaggaatttaatataaagcatctaaacacaaaacctttgaatgcagaagaaatgctaaaatggatagaggttaatcaaattgatatgttagttgatgcctctcatccttatgcacaagaagttacaaagactgcattagagtgcgcaaatcatcttaagattaagtatataagatatgaaagattaggtgctcttgagagtattactggagaagatatagtacgagttaaagactatgacgaggctattaaaattataaaaaatatagatggaaatattttaaatactacaggtggaaataatgtttctaagtttgtaaatttagagtttaaccatagagtaatacatagaattttaccatcacctaaagtattagaaaaaatagtcgaaaagggaattaatattaaagatattatagcgcttcaaggtccgatatcttatgaactagaaaaagcatttatttaccaatataatattaaggcaattttgactaaagacagtggtaaagaaggcggagttctagaaaagcttaaagcagttcgggaagccaagattaaattaatagtaatagaaaaaccaaaatttaattatgaattagtatttaatcatgaagaaaaattagtagagtttctgatgaaatataaaaaataaaatgggggcaaaaatgaattatatagtcaaaagaactacttcggaagatgtagattttaagtttttagagaagcaacttgatgatgagttattcgaaatatatggggatatgcaaagtaattattcatcacacaatacagctatagatttaaagacaattataatatttgttgaccaaaagccaataggctgtgggtgcttaaaatttcttgattgtgatttagcggaagtgaagagggtatatgtatcattagaatatagaaacagaggagtagctaagattatagtaaaagaaattgaaaagttagcaattgaaagtaatattaaaaatattattttgcagacaggaagcagacaaaaggccgctgtcaatttatacgagagtatgggatataagttaactgaaaactatgggccatatgtaaatgataataatagtatttgtatgaagaaaatcgtttaatagaaaaatttactatagagatgttaatatagctataaaaatgttttttatcgaaacaaaatagataaaagggggagatccttacggaaagtgaagagaaactgtcattttacgatgaagaattaaatgaaattggtatagcttctcgttcagaaatacatgcaaatggacttctacataaggttgttcattgttggatagtagatgagtctagcaatgaaaaatggatatatcttcaacagagatcatataagaaaaaagattttccaggattatatgatatatcagcagcaggacatgttgatattggagagaaaatagaaaatgcattaaagcgtgaggttaaggaagaaataggtatagaaattaattctaggaacttaagatttgttggaagtataagagaaaaacttaatctaaatagcttcttaaataatgaaatatgtgaagtatatttatataatataaaagatcctaaatttaatattggatctgaagtggaaaagatggtaaagttatcagttagtgaatttaagaagctggtattaggtcgctatgactatattatggctttttcaattgatgaaaagttaaaatttaatataagagctcatgaattttgtgtacacaagaaagaatatctaaaatcaataatagattttattggaaaatgattattgattaaattatctttttggaatataatcaaagaaaataaataattcatactgaagggagttaaagtaatgagcgttaaagaaaaagttctagaagttatgagagaggctggaaagccagttagcgcaggtgaggttgaaaagttatctggtttagatcgtaaagaaattgataatgcattcaaggaattaaagaaagaaagcgctattatatcaccagttcgctgcaaatgggagccagcaaactaatatacatgataattaaattgaagagtactcttgggataatgataatatcacaaaaagaggctctttatttttttgcgaatatatattgcaaaaataattctttatcataattctgaaaatattgaaagaattttagccataattgtgaaatgtgaaatttgcattgtgaattatgaattgcaacatatatatgatgtttaggttaaagaagctagctgttaattcattaataatttttttagtaattacacttaaaaatatatctaaaagaataagtgattgtcgaaatattatgcaaaaagtaatagaagtttaataaaaatagttatttgaaattcatatttacattatataatttaaatatataacttatagataatacaatttatcattaagtattggtttactgaaattctgaatgtaattttattattttagcataacgttttatagcttattaagagaagttttcttaggctatgatttttcatttataattatatattttttatgtgggatgaaagggagaattattatgaacacgagaaaaagaaaaagaggatttaaaagatttatactaaatattatagcatttggtattatagcctttgctatttttggagtttatagcggctatatggcaaaatataatagtataaacctgcaggatttaaacacaaaaatgtatatacaggatgcagataatgcgagcaaaggtaaacttcaagtaaactggaaattcatggcggctattgatggagttagatacaaaaatgatttttctaaagcaacggatagtagcataaatcaattagctaatatgttcatagataacaatagtagtacaagcgttaaaattaaaaatagtcaatataagctcgttgacttagatacagtgttagataagctatcttttgataaagaacaaaaagaaaaagtatataagtatatagatgatttaaaatacattggatatcaaaagaataatttaaaagatgaatctaagcaaggatttattaacgatttatatccggaagcaattgagatatatgataagtatggtgttcttccttctataactatttcacaggcaatattagaaagtggctggggaaaatctgatttaagtactaaagcaaataatctatttggaataaaagcagattcaggatggacagggaaaaaaattaaaatgagtacttcagaatattataaacaaaaaattgaggattactttcgggtatataatagtaaagaagattccataaaagattatggagaatttcttagcaataataaaagatataaacaaagtggagttttccaggcgtctgattacctagaccaggctaatgcaatagaaaaggctggatatagtaccgtagaaaatgacaagggagaagaaatttattcgaaacttctgataggagttattcaagaacaaaatcttcagcttttagatttcgaatgtgagatgaattattttaaagataaaaaataaattatacgcattatttatgaatttatgttatattaaaacaaaaaataatagcgtatataattgggggaaacgaaatgaacattaattctaaagaactaagagatattgttaatagtataaaagaagcagatgcttatgtaatcgctgaagcagacagaagaatggtatcacttgcaaagccactgaagagtttaggaaagttagaagaaattgctataaaacttgcgggcattactggaaaagtgaaaaataacataacaaaaaaaatggttataataatgtcctcggataatggtgtggttgaagaaggagtggcttctgcgcctcaatcggtaactttagcacaaacaattaacttcacaaaaggattaacaggtgtagcagttcttgcaaaagaaaatgatactgagcttatggtgatagatgtaggcattaactgtgattttagctatcctggcgtaattaataaaaagataagaaaaggaactaataatattgcaaagggtcctgcaatgacacgtgaagaagcagaaaaagcaattttaattggaatagagtctgttaaaaatgctaaagaactaggctatgaaattcttggtgttggagagatgggaattggcaatacttctactagcagtgccgtgttgtcagcattaacagatgtaagagtggaaacagttgtaggaagaggtgctggaatcacagacgaagcatttgagaaaaagaaggaagttattaagaaagcaataaatgtaaacaatccagcaaaagatgatccaatagacgtagtttcgaaagttggaggttttgacttagcagctatggcaggagtatttctaggatctgcttattataaagttccagttgttattgatggatttatatcagcagttgctgcacttatagcatttaaaataaattcaaaaactagagattatatgtttacttcacatgattcaaaagaattaggatttaaagttgcaatgaaagaattaagattaagtccaatattagacttaaatatgggacttggagaaggaagtggatgcccactagcattttcaataatgaaatctgcgtgtgcggttatgaataacatggcaacttttgaagaagcagaaattaacgacagttatttagatgaacttaaggctatgaataaatgataaatatttaaatgatctcagggtattaaattaactattataatttaataaggcacatgaaagtaaataataagtaaaaaactactaaggaatgttttttatgtagaaaagttctgtatttcagtatagatgctcttttcataagtgtatagctgctttttataagttgtatatttctagtcgtgcgaggaagtaaaagatcatcatagtggggttaatatggaacttaaagaatatgttataataactgtatactctatgaaaatatgagtatgtaaagcagttaaaactgataatattatgttttaataatttgataataatatatttgttttgacaaactgttataaagtaataaataagcagcatttttgaatataaaaatacttgtttttatgaataagaaaggagagtgtttatggaattaggacttattcatatttattgtggagatggaaagggaaagacaacagcggctatgggtcttgggatgagggctgttggacgtcaaaagaaagttttattaacacaatttttaaaagataatgagactggagagttaaattctattgacaagctaggaaatgactttgaagtttttaaaggagctcctgtaaagaaattttttaaatttatgagtgaagaagagcagatagagactaaaagagagcatgaggaaagattttttagagttactaagaaggctgtagaagaaaactttgatttattgatattagatgaagtggttgcatctactaacttagatttaatccctttaagtgaagtgataaattttttagaaaacaaaccaaagggattagaagttgttctaactggtaggaatcctaatgaaaagttagttgaacttgcagattatgtttcagaaattaaagctgtaaaacatccatatgagaaaggaataggctcaaggataggtatagagaagtaatttatttttaatagtattttgggcttaaattggagtatatgaattatttgataattggaggttctaagagtggtaaatcagaagttggagaaaaaatagctctgactttaaatagaaacaaagttatatatattgctacgatgaatccatatgataaagaagatgaagacagaatagagagacataaaaaaagtagagaaggattaaattttaagacactagaagttactagagatttggatagtgtgattaatacaatcaattgcaaggatactgtacttatagatagtataacttcccttttgactaatgagatgtttgttgaaaataatattataaaaaatccttcgtataagatattaaatgatataaggcaagttatgaataatgcaaagaatgttgttattgtaagtgattacatatttaatgatgctatacaatatgatgaaataactgaaaatttcaagaaagaactagccattataaatagagggttagcaaattattgtgagaatgttatagaatgtagcttcggattaattaagtatattaaacatgaggagaaataactttatgaaaaaattatataaaggatttattatggcattaagcatgtttacgatacttccaactccatatgttgaatgggatgacgatggagtaaaaaatatgatgaaattttacccactgattggattaataattggaatcttgtggagtataatatattatttggcgagtatattaaatatctcaattgttttaaagagttcgataattaccatagtaccatttataataacaggaatgctgcatttggatggttttatggacgtttgcgatgcaattctttcaaggagaagtaaggaagaaaaactcagaatacttaaagattcagctacaggagcgtttgcagtaatatccctagtgattttgttctttttacaatttggaggtgtatattctattttagaaaagaataattctctttatacattaattttgattccaataataagcagaagtgttgtatcgtattatcttttaagtagaacaactataaaggaaagtactttagggacttattttaaaaaagggactaatgtttatgataagcttattatgataataacattaataataacattaataatatcagtaattttgttaaatatttatggaataatattagttttattaatgagtttaggaattaaattgtcagtagaaaaatgcagaaaagaatttggtggaatatctggagatgttgctggatttgctttggttataggtgaagtagttggaatattaatactaggaataatcccgtaaagggaagggtgacgtttatgaaattaatttttggtggagcttataatggaaaattagattatgtaaaagaaaaatataaagtaagtaatgaacagatatttttctgtagggatgaaaatatagaatataataaggaaatcatatgtggattacatatttttgttaaagcgtgtatttctaataagcttaacccaatagaagttttaaaagataaaatggatttgttagaaaataaaataataatatgtgatgaaataaattctggaattgttccaatcgaaaaatttgatagaatatggagagaagaaactgggcgcttacttcagtttctagcaaagcattgttcccatgtatatagaatattttttggaattgaagaggaattgaaaaataatacaatttaaagaaagaggtaaattagttatagatttaattgaaaaaactatagcgattaaggtatgaacgaaattaagttatatttggtcaggcatggaaaaacttattgcaatgaaagacaattatattgtggtaaaagtgatattgaattaagtgaaagtgggaaagagcaattaagggaaatttctagaagggttaaatatacaaagtgcgatttttactttacaagtggggcaaagagagcaaatcaaacattagaaatcatttgtccacagaataagtataaaattttaaacaagttttttgagtatgattttggtgattttgaattaagatcatatgaagaactaaaattgttaaaagagtatataacttggatagaagacaaagaaggaaatgtaaaatgtccaagtggagagagcagagcagaatttagaaaaagagttaatgatggatttgtggagcttataaattatctcattaaagaaaatatagatactgcttttggagtgattcatggaggaagtataggtatactattggaaatgttttatgataataagaaaaaattctatgagtggcagcctagcaatggagaagggtacgaacttacaataaaaattagagaagacgagcaatttgaaataaaaaatgtatctcaaatatagcaagataatatgattagaactattttggagatgcgaaagaagataacgaggagaactatatgattgaacttagtataggatttgttttggatttattaattggcgatcctaataatccgcttcatccagttagaggaattggatatgtggctaaaaaacttgaagcactgtttagaagaatccttagaaagcatttaaaagcagcaggtcttattgtatggattcttactgtgtcaataatatttgcaattgtattcgcaattattaacttatctagagaatttaatatttactttggaattattttagagggaatcttgatatatttttgcatatcatcgaaagcattagttgttgaaggatataaagtagttaagtttttattaataaatgacttagatggcgcaagaaagcagctatcatttatagtggggagagacactgcaagtttgagtaaagaaggaataataagagcagttgttgaaactatagcagaaaatatggcagatggggtcatagctccgttattttatgctatgatttttggagcgcctcttgcattcgcatataaagcggtgaatacattagattcgatgtttggatataagaacgatgaatacatagagtttgggtattttccggcgaaattggatgatatttttaattttattccagccaggataacaggaatgttgataatattagcttctgcatttctaggatatgattataaaaatagctttaagatatacagaagagatagacataatcatacaagccccaatagtgcgcatccagaagcagctatagctggtgcattaggggtacagcttggaggggcaaattattattttggaaaacttgtaagtaagcctacaataggagataaaattaaagaaattgatatcaatgatgttaagaagactgctaaggtcctttatttatcattttttataggatttgtgcttactttaatatttagaaagctaatgataacaatgttttaagtgtcagaaatttgggtgattaacgaatattataatatagagatgtgagagttaatattaaattaaaattaatatatatattgaaatagtaaatttatatttaagcttataacaagctaaaaataaattaagattgaagtggagaaatttaattgaaacatatatgcactatgcatagggaggaaagtcatggcaagctttggacatggtggaaatgctaaagaaataagtagagaaaacaaaataaattacaaagacataattgatttttcagctaatattaatccattgggaatgtcaagtagtgtaaaagatgcgattattgaaggtatagatgaaattgagaaatatcctgatataacttattttgaattgaaggattcaatagaaaagttcgaaaatgttagcaaagaaaatttgattttaggtaatggagcagcagaagttttatttaattcagtaagaggagtgagtccaaagaattcactaattttggccccaactttttcagagtatgaagaggcagcaaaggcaataaatagtaatattatttattataatttgaaagaggaaaatgattttaatataagagaagatattctaaatgatataaatgaaaacttagatttgatatttatatgtaatcccaataatccaacaggtgttataactgaaatagatttattaaaaagaattttgaacaaagcagagagaaataatgttagggtaataatagacgaatcgtttttggatttcagagaagaaagtttttcaatgattccctatatagataaatataaaaatttaattataataaaatctttgaccaaattttttgcgcttccaggtataagaattggttatgctatttgcagtgattcaacactaaaagagaagatagaaactatatctcctgcttggaatataaatatcttggcagaaatagcaacaaaagcagcacttaatgaaaagaattatataaagaaatctatagaatttatagaccatgaaaaaaaatacctttataatgaaataagagaaatagatggaattaaagtatttgaaccaagtgtgaattttgttttattaaaaactctgatcaaaatagatttgaaaaaagaactattaaagaataatatattaattagaagttgtagcaattatgtaggattagataatagatattataggattgctgtacgaagtcatgaagagaattacaaattgataaaaataatgaaaaatatatttgaaatgcacagaaatgaacaataatttaagttatgtataggttaattttattgtttgaatcagatgaaatattaagctttgataatgagaggagccaggatatgaatagaaaatttattgcttcaataatgagcgtgcttgtaggaatgagtataggaatctctaatgaagttaatgcagaaattagcaatggatgggtcaataacaataatggctggagttattatgaaaatggcagtgtaaaaactggatgggtaaatgataagggaaatttttattaccttaaagacgatgggaatatggctgtaggatggattaatgttaataacaagtggtattatatgagtgaatctggagccatgaaaacaggttggattcagtataaaggggcttggtattatttaagccaaaatggagaaatggtttccgatgatactgttgatggatactatttaggagtagatggatcttgggttgaaaaaaattcaactagcgatgcgacggaaattaatgatgaatttaaaaataatattactatgaaaacagaaaaaaatgaatatggtctaaatactaaagaaattactgtgtatattacaaataatggaaaagaatcagcttattatggagtagaatatgcagttgaaaaatttgtagataataaatggagtaaagtcccttttaaagatgaaccaatgtttatagaaattgcttataatttagaaccaggaaaaacaagtagtcaggttatttctctagaaaatttagagaatttaactgcggggaaatatagaatagtaaagtttagcggaagatgtgctgctgaatttgaattaaagtaaaaacaaataagaggggtagtatggataaagaaaaagttgtagtttcattcagcgggggaaaagattgcactttagccttgtatagaatgattaaaagtgattataaaataataggattattagttactttcgaaaataaaaaggattcgtattttcataaaataccaaggaatgtttttcaggacatttctaaagaattggaaattccacttattgaaatagattgtagcaataagaataattatgaagaagaatttgagctggcattaaaagcttcaaaagataaaggcgctgaaatttgtgtatttggagatatagatatagaagcacatagaagctggtgtttagataggtgcaaggcagcagaaattaaaggagtatttcctttatggcaagaaaatagggaaaagcttactaatgaatttatagaatgtggttttaaggctataattaaaaaggtaaatctaaaggcgctaggaatagaattcttaggaaaagaattaaccaaagatgttgttaatgaaataaaaaacttaggatgtgatccttgtggagaaaatggagaatatcatacattagtttttgatggtcctatatttaagaattcaatcaaatttaataagagtggtacagaggttacagagaattatggatatttaacagtaaacggattattagattaatgataggacttggaaaaataattcgaaatttgaattcaaatgttggaagtcagagattgaaaattaaatgttaagtattggaactcgaatttgaggggagtaaagaaatggataaaaaaagtataatgtttttaggtacagcgtcttctgttggtaaaagtactttagtaacagccctatgtagatatttaaagaatcaagggttaaatgtagctccttttaaggccctaaatatttcattaaattcttatgtaacaaaagatggattggaaatgggacgagctcaagtagttcaagcagaggcttgcaaattagagccagatgctttgatgaatccggttttgttaaaaccaagtggtgaatatacacaagtaatagcagatggaaaagttttttgtaatattgagccttataaatacaaggaacttaatgaaactttaaaggtcagagttaagaaagcttatgataagctaagtaaaaagcatgatgtaattgtactggagggatctggaagctgtgctgaaataaatttgaaagatagtgatatatctaatatggctatggcagaaattgctgatgcacctgtaattttagtatccgatattgatagaggtggagtttttgcatctatagttggtacaattcaattattacccgaatcagagcgtgaaagaataaaaggggtaataattaataagtttagaggtaatatagaactatttaaacctgcaataaaacagttagaggagattataaatattccagtccttggagttatgccatatgaaaaatttgatattgatgatgaagatagtgtaactgaaagaattaggaacaaagaagaagttggaactttagatattgctattatcaggctttctcatatgtcaaactttactgattttagtattttagatagaattccagatgtgactatacgatatgtggataaacctagtgaattaaaaaatccaaatttaattataatacctggaacaaagaatacaattgaagatttaagaagtatgaaagaaaataaattatttgataaaataaaagaattaaaagagagtggtacacccattttgggaatttgtggagggtatcaaatgcttggaacgttgatactcgataaattaggcgttgagggtaatatatctcaagaggatggtttcggatttttggatataaagacacgatttaatgagacgaaagttacaaagcagactaagggaaatattttatgtgatctaaaatcaattaagtctatagaaggtagtactataagtggctatgaaattcataatggaataagtaagattggtaagaaagcaataccttttattaaggatttagatggtgatatcgtaggtgtatgcgacaaagaaagaattgttgcaggaacttatcttcatggtatgtttgattcagaagaatttataagttcatttgttaaatctcttaaagaaaacaacgatattgttgttacagaagatataattatagaaaaagtaaatgaatataaagataatgaatatgatagattatctaaactttttgaagaaaatatagatatatatcagttgagaaaaataatggaactttaggaagaaggggatagagatgttaacggctactgaagagagattattagagtatatagaagaacgcgcaagagcaaatgttaagggtaaaactttctataagatgacggatatattagagcaggcgttttggatatctgaagaaaaggcatatgaggttttaaagaatgtaatagctagaaaaaatataggaaattccaaagatgctattatagatgaatatattgatatgcttaaaaaaggatatggatcaatacaagaacaggtagatttatttggtggggataagtatacgagtattatgtatgcagctgaaagaaggttaaagcagtatgaaggtggtacgttctttgatcttcttagagaagtttataaaatcccagacgaagaaattatggaggtaacagaaaagtatttaaagtttttaaactctccaatattttcctataggctagaaaaggagacttttcataagtttctacaatcagacctagaggaattagataagcagttcaataggtttgtaaatttatagtattaagttaaaaaataattattaagcgaacatatcgtagttaaagataataattacgcttttaggtattagaagtaaatttatataaatagagcatatatgtattctaaagaataaagaaaataatagatacaatttttatacccagtttttatagtatttatgtaataatatactatatgaactgggtataaatttatcattttaatactctaagtattgctaataatataagtagagctcctgataaccaagataattcaaggtgtactttttgagcaaattttcgtccaataactaccccaagagatactagagaaactcctatgataaagcataatactaaaacttccgtatagttaatgttacataggctagatccaattcctactgcaagactatctaatgataatgctaaacctagataaaatgattctttaatatttaggcatttagagttatcaaaatcagcttttatttcatctgcataaacttgcaagacaaattgaaagtcaaatatcttaaatgttaagggactatcggatttcgagcattttgaaatatatgatttaaaaatatattcaaataatctatatattccaagtaacatcaaaagtacaaatcctaaaattgcaggaaggttacttgggagtatgcttttaactattgagccaataagtaaagaacaagcaagtgtaatggtgcatactaaatttattactactgcgcatatgggtggaatacgaattttcgaagtaccataagcaatacttgcaacaaaagaatctatgcataacgaagatactaataataaagactcaagcataactattacctcataagttttagatacaattcatgatatgaaagaaaactactattagttacaaattttgaggttttatattattttggaatagatttattaataataattgaaattcctatagaatccctgtaaactataagaaataataacaatgaatatataatatatattgcaaaaataattcttcatcataattctaaaaatattgtaagaagtttagacgtaattgtgaattgtgaaatgtacatcgtgaattgcaacatatgtaatatattgttttaataacatattcatatatatagcttttggtaatttaagtatttataatgtagcaatttaatcgcaacatatatatctaaaaaataccagtaaatatgctgtaaattatattatataaatggaggaataaaatgtataaattacttgcactagatatggatggaactttacttacaacggataagaaggtttcaaaaaatactgaggcagctataaaagctgcagaagaaaagggcgttaagatagtattagcatcaggaaggccattagatgggttaaatagatatttagaagagcttgatttaaaaaaaggtgaggactatgtacttagctttaatggaggattagttcaaaatactagaggaaaaattgtctcaaaggtatgtttaaaaggaactgatttaaaaaatatatatgagataagcaagaaacttaatgtaaatatacatgctttttctactaaggatggattaataactcctaaaactagtcaatatacagagtatgaagctacaatgaatggaattgatattactattaaggatttcaatgaagttgatgacaatgaagatattataaaagtcatgatgatagatccacaagaaatattagatccagccataaaggaattacctagtgaaatttatgagaaatatagtgtatttaaaagcgcaccttactttttagaatttactcataaggaagtagataaaggacttggattaaaaaaacttggtgaatatcttgggataaaacaagaagaaataattgcatgtggagatgctggtaatgacttatcaatggtaaagtatgctggtcttggtgtagccatgggaaatgctactgaagaaattaaacaagctgcaaattttattactgattcaaacgatgaagatggaatagtaaaagtaatagaaaaatttattttaagtgaatctaaataggaatttataggagattgttttatttctattgcctaaaacacattttgataggcagtataaaacaatttctttttattctttgggaactacctatcaaggcaaagccatcaaagagtataatgaaagtagttttattttcgcaggaaattataatacgttgaaatatatggacattgtgtggcttgtgagtataattaatataatagcctacgcaagtgatggatgaaaagaacaaaaacaatagaaaataaatagatttaattaataaaatttgatgtttaaggtaatataatatatttatacacctatacgtcaggattaatttacttaataattaaatatttaaattaattgtttgattattattataggtgttacacaaagaaaggctatgtacatatggtctatatttaggggtatggtataaataataatgatttatttagggggaatataagctttgagattagtcccaattgaaaacgtaaagccaaacacagtacttggaaaatcgctgtatgatattaatggtagaattctacttagagctggagtagttttaagagaaaatacaattgcaaaaataaaggaaataaatattttatcaatatatatagttgataaatatagtaatgaagaaattgaagatattattaagccagaacttagacaaaaagcaattataacaataaaagaagctttttctaacataggaagacttaataataattcagtaaggaataaagaaagtgattatacttggcaagagcagagttatttctataatattggaaagatggcagtagatttaattgatgatatcttaaatcgaagggatgtaatgcttgcattagtagatatacgaagtatgaataattatatgtattctcattctgtaaatgttgcagtaatatcacttactataggaattgctcttaaactatcaaagaagaaattggaagctctatgtataggcgcattgatacatgatattggaaaatcactagtacctagagagatatttgataaacagggaagtttaagtgaagaagaaaaagaaatattaaaacaacatccaagacttggatataagtatttatcaactacttataatattaatagtctaagtaaattaatagttcttcaacatcatgaaagaccagatggaaatggatatccagatggattaactaaggataatattattgaactaagtaatattgtaagtattgccaatgtatatgataatttatcaacagacttgccgaataaaagagcaatgtttccaagtgatgtactggaatatttaatgtctaatgcaggaacaatgtttgattataatatagttaatatattttgtagaatagtaattccatatccaaagggaactattgtagaattaagtacagaagaagttgctgtggttgaagaaacaataccaggattcccgctcagaccaactgtaagagtaatagaaagtcctagggtaagtagaattagtatgaaaattgatcttataaaagaaatttcaatagttattaccggggtgaaatatgaaattgattagtataagaatataaaggcaatcttaatttaaagattgcctttataactattcaaaaatgtcaataaacttaaaattgataacatcaaataaacctttatctgtaatctttaaatctggtattactggtaatgataaaaatgataatgttaaaaatggattaaaatcaatttgtggtgctatgattttgatagctgaatggagattttttaaatcaaactcaatttcaccatatgttctatttgtcataagcccaccaatttcaagtttaatatgagcaagaatatttttatctttaactacaattataccgccgcccattcgctccaattccttagcagcaaatagcatatctttatcatttgttccagcaattattaaattatgggaatcatgagcaatggtggttccaatcgcaccttccgaaattcctaaaccttttaagattccaagccctaaattgccagaagccttatgtctttcaataactgcaatttttaataagtcatctttagttgaggaagtgaaaaatttataatcattgtcttttattgaattaatatctgaaatatttagttttaagtgaatgctttctaatttatttggaattatttctattgaatttaatatcttagcatttttatttggtatattaattttgaaactattttcacttagcggtggaagatttatagaattataaaaagcactattatttgcgttttttaccgaatctgtatcgaaattaacaagttcattattgtttacaactagtttgccttctttataaacttgagatattttaaatctttctaagtcatctaataatataaaatctgcaatgtatccgggggcaattgctcccttgttatttagtttgtataagagagatggatttagtgttgccatttgaatagctgtttctggatttaagttagagttgtttatagtataaataattgagctattaattgatccattagcagcaatatcgtcaatatgcttatcatcagtgcagaagcaaaatctattactattagattcattgactgcaggtaataattccttcaagtttttagcaacggtaccttctctaattagaatatacataccacgtcggattttatcaagagcttcttcagcattattacattcgtgatcggttaaaatattggcggtcctataggtgtttgtcatcatagatgtgaagccagccccatgaccatcaataactttattattaataattgaatcgtatatcttatcaattatcttatcatcacattctgagactgaaggataatccataacttcagctaaacctaaaactttatcatttttataaaaatcttttaaatccttagagagcaaagttgcaccagagctttcgaagctggtaccaggaacacaggatggaagcataaagtatatatcaaatgggatgttttgtgaagaattaagcatgaaatttataccatcagttcccataacatttgagatttcatgaggatctgcaacaacagatgtgattccgtttaataacgccagtttgctgtattcagtaggtgtgactaaactagattctatatggcaatgggaatcaataagtccaggacaaatatatttgttagttccatctacaatttcatacccatcatagtcaccaataccaacaatatatccatctttaataccaatagtatctacgaatctattcttattaaaaacatcaattatggtaacatttttaattacgagatcacattttatacttccattagaagccttaatatgatttattaatgtatctttattcaaatcaaattcctccttattacgcatttttattagttatattcactgtatctaaaaaatatattgccttattataattgaaatttgtgaatattgtcaaaagtaaaaatgtttacaaataaaaaatatatattatttatttgtgataacgtttaggcaaagggcttttgtacataatatggagataagaaagttaggtgcatattataaatttagattataatatgcaccaacttttaattatatgattaattatttgactaaataaattctatacatgttggagttgggatgttttcagattttataaaagttaattctcctgttattgaattaatagaaaatatagatatattatcggaattttcattagcacaaagtaggaatttaccagatggatccaattgaaaatctctaggagaatcaccattacaagaaatagtgtttatatacttaagctttccattatctgaatttatatggaataaacttaaagaattatttcctctatctgaggtatagagaaatttattattcttgtgtatacgaattgcggaaccagattttgtcccgttgtagtcctttggtaatgaacttaaagtttgaatattttcaaaagcaatatttgattttactttataatcaaaaacaaatatttcagaagttaattcacttaaaacgtagtaataggattttccattagcataagtaatatgtcttggccctgtgcccgcagggaatgtatagcttaaactttcattctgatatagtttcccatcttttattgaagaaactatcattttatcaatccctaaatcaatagataaaatatatttctcatcattagtaaacattgagcaatgaatatgaggtttttcctgccttaattgatttacactagacccactatgacttccaagcataggagaatttaaaatcaagccatctaaagttttgtagacaaacatcttgttttcatgatagtttgaagaaattaaaatctcatgactgttatttagacttacatgacaaggtggtttttcttctgaaagattagagtttattaagtgtagtttattatcttctttccaatatttaaatgaagataccccagccttttctttaactttacatgttgagtaaagaatgtgtcgttctctatctagagttagatatgtaggattctctatattgtaagctaagttgatattttcaatattacctgaaattgtatcaaaattaattctatagattcctttactttcatttttggtataagttccaataaatccaactgaaatattttcttttagtaccattatatatgcccccttttattgtatatctattagtatagcataaatggaagtaaaagatatttatgaaattttgcagagatctattgattttaatcatttaattatagtagtggaagaaataaaaaaaattaataattgtgtataattattaatgttaaaatacaattaaataatagtaagtttttgtaaatagttaattataaacatttataaactgaaaagaagtaattctatgatttattaacagtggttaccataaaattagttttatacaagtaaatagtaaaacaattctctataataattttaaaaatgtttcaagaattttagccgtaattttgaattgtaaaatgtgcattggtaatcgaaacctatataaattatcttaaagaatttatatcatatatttatagtttaacttgtgaaaggtatagcaaaataaattatttaatcttacataattttagtattatatttatttttataatgttgataagaggtggaattttgatataataatatttatatacaaaaataattaaataataatctaaaataagcaataatcacattggggggaaacaaatatgccaataaaaattcctatagaattgcctgcatttcaggttttatctgatgaaaacatattcgtaatgaataatgagagggctaatactcaagatatcagaccgctaaaaatagcaattcttaatttaatgccaaaaaaaatagtaacagaaaatcaattattaagatatttatctaacacgccactacaagtggaggtaagtctaatacagactaaaagttatacttcacacaatacaccaccggagcatctaaataaattttatagctattttgatgatataaagcaagaaaaatttgatggacttataataactggagctccagttgaacaaatggcttttgaagaggttacatactggaaagaacttactgaaataatggaatggagtaagactcatgtattttcaacattctatatttgttggggggcacaggcaggtctatattatcactataatatacctaaatatgatttagatgaaaaaatgtttggtgtgttctcacattgggttaatgatgagaaagctgatttgacaagaggattagatgatgtattttatgcacctcactctagacatactgaagtcaagcgtgaagatatagagaaagtttcaaatcttgaaattttatccgaatcggaggaagctggagtatttatagttgcaacaaaagataggagaaatgtgtttgtaactggacatatggaatatgatagaaatacattgatggatgagtatataagagataaagaaaaaggcgatgaaatagctttacctaaaaattattttaaaaatgatgacataaatcaaaaaccgttgtacacatggagaggtcctgctagcatagtttttggaaattggctaaattattgtgtataccaaaatacaccttttgatcttaatactctttagaaattttatagataaatataagtgctttttaagcacttattattttgttcttaaattttgtgaatcgtatataaggagatattgatgaaggaaaagaattttcatttaatattattaataagtatatctgcaattttagttgcatcgggaataaatcctcatgatagatttacatgggtattagaggttcttccggcagtgataggagttatggtcttaataactacttataataaattcgtatttactaacttaacttatactcttatttggtttcatgcagttatattaatagtgggtggtcattatacatatgcagaaatgcctttatttaattggctaagagatactttcgacttgagtagaaattactatgataggcttgggcattttgcacaaggatttataccagcaataattattagagaaattttcataagaaacaaaattgttaaaaatatagcatggacaaattttattacaatatcaatttgtcttgctattagtgcttcttatgaaataatagaatttattgtagcattaattactggtgaaagtgcaactgcttttttaggaactcaaggagatatttgggatactcagtgggatatgatctttgcgcttctaggctcaatggtttcagtattaacgctgggaaaatatcatgagaatttattaaagaaaaagcaataatattttctttaacaaaatttgaatattaatatgtcattattaataatttaaatatagtacagttaggaaaatttgcataagaagtatgaatggaactccaattgtaaacttcttatgctttgttttatgcctaaaactagacattccaataagcatgccaatagagccacccaaaatagaaatacctatgagatttttttcgggtattctccattctttatgaatagctctttgtttatctataagcataataagaaagcctagaaggttgataatcaataaatatgtaaacaggatttttaacataaatttcactccaatataatattaaatataaatttgatactaatgataacataatttatactggagcacaaaatataggaacatagaatgaaaaaagttgaatctactaaagtctattagtattgcttattttgaatatatggcattagccgcctaaagttacatcttgctcattgtaccacgataaagcatcataaaagtcttctttcctaaaatcaggccagtaattatctaaaacataaaaatctgagtaaactgattgaactggcaataagccgcttaatcttcttcgcccaccccatctaattataagatctattctagaaatatcttttgattgtaaatatggttgaatatgcttttttgaaatatctgcactttttagtaaatttaaatcccattcccaaccataattgattagaaagtttgcctttattccgcctaaaccaaatttttttcttttagtgaatggtaatagttcctttggaaagcagctagactcagtattacctaagactaatatttcgcaatcttctttcgtcaaaagcataacagaatcaatgcaagctttagtaaacgctactttttgctcgctgggacgtttggtattatcaattgtgaatccataaaaggttacttcctgaatattttctttttggcataatttaaagacctcaagtcctggatttattccgtgatcatatcccttatctttgcttaatgagttagataaagcccaacgtctatttccatcaggaatgatgcctatgtgtttcgggattcgcataatttttttcacctctcaaatttgatattgcttttaagagtataacccaattaatccaaaaaaatacacactgatgaaaaaagcgcgaagcgcaaccaagatcttagatgaaaaaagcacttacatataaaaaaagcgcgaagcgcaattcgggacttgctaagcccaactaagaactttgtgtaaaaagtgcgaagcgcaaccgagatcttagatgaaaaagcactcacatatgaaaagagtgcgaagcacaaattcggaacttattaagtacaaccaggaaatcaggtgagaaagtactcatttatgaaaaaagggaaaagcataattattaaaataggttagatatagacttaaaaaataaaaaccctaagcacaagtttaggggatcctatgcttagggcgagtcattaatatataaacgacttctattaattaataaggggtaaataattaactactttacgatattagtataatcctgaaatgtgtcaaaaatatgtcagaagtaaaaaatatatttaatttatacaatgatatttataaagaattgcattactatagagtataagctattaagttatatgaactgattataaatatttaataattaatcataaattaaatgttttttgagtgaaaatagtatatactaaaatattagcagaacaagatgtttatctaagtttagaaatttttttagaacaatgttatgttaatatattttaaggaatatactttgattagaattttatttgataaagagtaagaaaaatatttttcatttctatattaatcagagttaatctataattcctataagaattgcttggaaaaaacaatctctatctgataaacttaagtgagagtccaaatgtatcatttggcaattcgaacttactcagcgaacgaatgtgagtcgagtttcagctaatgagtccaaaagtgaagatcaaaattttacatttggatactgaactttctccttgcgagaatgtatcatttgtgaactagaacctactcagcggacgaatgtgagtcgagtttcagttaataagtccaaaagtgaagagccaaatttcatatttggttactgaattttctccttgtgagaatgtatcatttggaagaggatgaaaaatgtaaataaaaaaatatgtgaggtgtcaatacgtgataggcttaataggcataagaaaaaatactccattggaaattagagaaaaatttatagttaagtctaaaaaatataacgagtactttggagaattattaaaggagctaaatgaagtagttattttagctacatgtaatagaacagaaatttattttaatgcttctttaaatgaagaagaattattaaaaaagatttttgatatttttaattgggattatgaatataaaaaatatgtttttataactaataataaggatgcttataggcatttgtttgaagtttgctccggatttcattctaaaatattaggagaagatcaaattctagggcaagttaaggatgcttatgaagaagctttaaaatttaaagctgtttcattagaattacatagattatttcaggaagctattacttgtggaaagcgatttagaaaagaagctaagttattcgaaattccagtgtcgtcttcttcgatagtggttagcggagctattaatcgagaatgtactaaatttatggttttaggttatggcgaagttggacagcttgtaatgaaatatttgctttcacataaaatccaaactgtctacttggttgttagaaatcctaaaataaaaaatgaaatacaggatgaacgagtaaaagtaattacttttgaagaaaagaataaatatattaatagtatagaatgtataataagctgtacttcagcaccacatccagttgtaaaaacagaagatattagtgaaagcggaaatagattactaatatatgatttatcggttccaagagatgtggaaaaagaggtagcgttattatctagggctgaagtttataatattgatacaataagccgtatagatgatgcaaataaaaaattaagaaaagataagatggaagaaaatagacatataatgaataaatacctaaaggaatatgatgaatggttaaaattaagaagtatttctcatgtaatcaaaaacttaaaaactgttggaaatgatgtttacgagaaaagagttcaaactttttcacataaaagcaaagataaaaatgatattgctttagcacataaattaattaaaagtacatctgatttttacataaatagagcaattgaagtaattaaagaagagactctaaaaggatgtggtgaagaatggatagagataatagagaagatatttatgacgaaggaatagagtattcttatatctcattaatttctaaaaaactgagagttggaatagttggcggaggtaaagcaggcacaataaaagcaagacattttgtaaaaaataaatgctgtgttgaggtaatctctaaaacttttgatggagaattaatagaactttctgaagcatttccagaaatacttacgcttatagatgaagatttaagctatgaatttttaagggataagcatcttataattattgcattagatgatgaaaatttaaaaaacatagtaaagaaatattgtgaagagaactataagatatatatagattcatctgattttataagtggaatgggagttgttccgattcaaagaagtacagaaaatgcagtatttgctttaaataccaagtatggaaatccaaaaggagcagttttactttctaacaaagtagaaaatactataaaagaatatgatgaatttattagatatataggattgatacgaaataaagcaaagtcatttccagagcttaaaatacagataacttcgtttgttggaaatgatgaatttaaaagatcttttgataagggtgaagctgaaaaagcattaagaagcagattttcgaaggaaattgtagattatttaatcaatttttaaatgggtttgtagataaatgaattttggaggtagaattaaattaatgaataaattgactatagcaacaagaaaaagtaaattagcacagacacaaacagaaataataatgagaagtttaaaggataaatttaatatagatagtgaaaaaatgcttattgttactgaaggagatagaaaattagatgtttctttagcaaagataggcggaaagggattattcgtaaaagatatagaaattgcacttttagaaaaaagagctgatggcgcagttcatagtatgaaggatgtaccttatgaattgagtcacgaatttgaaatagcggctataacggaaagagaagatataagggatgtattaatttctaaagatagtataccatttaaagagcttagaaaaggtgcaataatcggaactagcagtataagaagagcttgtcagctaaagcttatgagaaatgatttggagatagttccaattagaggaaatgttcaaactagattagagaaaatgaaagaacagaatttagatggaatcatactagcttcggcaggattaaaaagattaaatgaagaagatataatcactgagtattttgatcctaaagtatttataccagcagtggctcaaggagctttgggaatagaatgtctaaaaactagcagtgctaaaagatattttgaaaaaatggaagattcaaatgctaagttaacagttgaggctgaacgaagctttatgagaatgctaaatggtgattgtcacagccttattggagcttattctgaaattcaaggtaatgatttatatatgattggtatatatgacataggcggaagaatagttaaaaaagatattttaggagataaaaacgatcatattgaattaggaagaaaattggcaaataagatattagagatataggagagaaggaatatgagtaaagtatatataattggtacaggtccaggagatgaagagttattaacattaaaggctgtcaaggtattaaaaagatgtacagctgtcctttacgatagattggtttcaaataatgtattaaattatctggagccaaattgtgaaatttattattgtggaaaggaaccaggagctcattcaaaaactcaagaggagattaatgaacttttagttaaacttgcaaaagaaggtcatacagttggaagaattaaaggtggagacccctatgtttttggaagaggcggagaagaggtattggctttagttgatgaaaatatagaatttgaggtaataccaggggtaacatctcctattgcagttttaaattatgcaggaatcccaataactcacagaaagatagcacaaagttttcatgttataacaggaaaatctgcgcaagatttaaatgtgaattttaaggcactagctaaagaagaaggcacattagtatttatgatgggattaggcaatttagataatatagttgaggagcttattaataatggaaaagaactaacttttccatgtgcagtagtgatgagaggaacttcagctaagcaaaaaaaggtagtaggaacgcttgagaatatttcacaaaaagtaaaagatgctaaattacaatctccatgtataattgttgttggtgaagttgtaaatttaaataaagatttgaattggtatgaaaataaacctttgtttggaaagaatatatgtattacaaggtcaaggagacaatctgagaaattaaaaaataaattagttgacttaggagcggaagttacaagttttaattctattaagatagaaagcagtgcggaaaacttaaatgattatatagataagatagaaaattatgatcatatagtatttacttcagttaatagtgtagaaatattttttgattatcttattgaaaaagactatgatataagaagaattaaggctaaaatatctgcaataggtgctgctactgcaaattctttaaaacaaagaggaattatctgttttgcaaaggccagagaatttgttggtgaaggtttagtaagcatattaaaacctcatttgaaagatgatcaaactctacttttgccgtgttctgcaaagagcaggaaatatatctatgaagaactaacaaactgtggtgcaagtgtagataaagtatatatatatgatacggtttgtggatcagtagttaataagagatcttttgatgaagttgacatagtattcttcacaagtccgtcaacagttgaaaacatgattgatatgttaggtatcgaggaaattaagaaaaagcaagttatagctataggaccaaagactaatgaacctttagaaaagtatggaataaaagcatacgtatgtaaagaacactcagaggaaggatttctgaaagagatagaaaatttatgtaaaaaataattagggagatgggaatttggttatttcggtttctattatgataatttttattattataggattcctgctaatgaacaataaatgtttatggctcctttctggatataatacgatgacaaaagaagaaaaggaaaagtacgataaaaaagccttatgtaaattcatgtcttatttaatgtttgcaattgcagcatgccaaggttttatagcgttgggcggttacttaagaaaaagctggatatggatattggcgagtaccataatgattataatatgcatcggtgctgtgatttattgcaatagaggaagtagatttttaaaatgattaatatataaatttagatagtaaataaaatgagtgacatctttgaagatggctgaaataatggaggagtttgttatgattaaaagaggtagaagacttagagttaatgctgccattagagatatggtaagagaaacaagtttagattcaaaggattttatttatccaatttttgttgttgagggagacaatataaaaaatgaaatttcatcacttccaggcgtttatcattattcggttgatagactgtatgaagtagttgaagaagttagagaagctaatatttctggagtattactttttggaattccagaccataaagatgagtgtggttctgaaagttataatgataatggaattgttcaacaagcaataagggaaataaaaaagcttgataaagaattgcttattattactgatgtctgtatgtgtgaatatacttcacatggacattgtggaataattcatgatgaatatgtagacaatgatgaaacattaggatatttaagtaaaatagcagtatcacatgctaaggcgggtgcagatattatagctccttcagatatgatggatggaagaattggatcattaagaagtgcattagatgagaatgactttaagaatgttagtataatgagttattctgctaaatattgctcggctttttatggaccgttcagagatgctgcaaattcagcgccacaatttggagatagaaagacatatcaaatggatccaggaaatagaatggaagccattcgtgaaacgcaaatggatgtagaagaaggggcagatttcattatggttaagccagcactttcttacttagacataataagagattgtaaagaaaacttcaatcttcctctcgtagcttataatgtaagtggtgagtatgctatgataaaagcagctggaaagcttggcgttattgatgaagaaagagtaatgatggaaactttaacatcgattaagagagctggagcagatataattatcacttatcatgcattagaggcagcaaaagttctaagaagataagaaagtgtagtatatatattaattaaaaaatttatatatattgcaaaaataatcattcaccataattctaaaaatataacaagaattttagtcgtagttatgaattgtgcattgtgaattgcaacataaatatataaattttttacaatttaaatatttaaatatgtaaatatgaaacaataaaaatataaacatatataaatatttatagattttatgcggtctaaggaggagttaaattgaaaaacgttgatatatttaaagaatcagaggaatacatgcctggtggagttaacagcccagttagagcttttaagggagttaatttaaatccgcctgttataaagagcggaaaaggtgtaataattaaagatgaagaagataatgaatatatagacttcgtattagcttgggggccattaattctaggacattgcgatgatgatgttgtagaagctattaaggaagttagttcaatagcattggcttttggtgcaccgacaaaattagaattagatttggcaaaatttatgtgcactaatctagataatgttgagatgctcagaatggtgaactctggaacagaagctactatgagtgcagttaaacttgcaagaggatacacaaagagaaaaagaattgttaagtttgcagggtgctatcatggacattttgatggttttttaattgaagctggatcaggagtaatgacaggaggaataccaggttcacttggtgtgccaaatgaaagcatagaaaatacattaattggtatatataatgataaggaacaaattacagaattatttaaaaaatatggtaatgaaattgctggagttattattgagccggtagctggaaatatgggagtaataaaggcagaaaatgattttatggaaaccctaagagatctttgcaatgaatatggttcactattgatatttgatgaagtaatgagtggatttagagtggcatttaaaggagcacaatcactatttaacgttaagccagatttagttacttatgctaagatcatgggtggcgggcttccatgtggtgcatatggaggaagaaaagaaataatgaaaaatttatcacctttaggtggagtttatcaagctggaactatgtcaggtaatccaattgttatggcagctggtatcgcaactttaaagaagttgaaaaataatcagaattattatgatcacatcgaaaatataggagctagacttgaagaaggtataataagtgtatcgaaaaaatataatcttccagttgtaatgaatagagttggaggaatgatgactttattctttaatgatttaaaagaagttagaacttatgatgatgttaagaaatgtgatgtaaatagatttaatagatattttgaacatatgctaaaatcaggatttaatttacctccgtcacaatttgaagcattatttttaagcgtacaacataaagaaagtcatatagatgctttcttaaaagcatttgaagaatttgcatcaaatgaaaataaaatgagtttataatagaatgcattaataaacttataaaaggaatgacttacatatgaataaaattaattatcaaaaggaattagattccttaattgaaaatttggtaaaaaatgaagaggttccaactttactgcttcatagttgctgtgcaccttgcagcagctatgtgttggaatatttgtcgcaatattttaagataacgatcttcttttataatcctaatatatacccaatggaggagtatactagaagagttgcagaacaaaagggtcttatatcagaaatgaaagtcaaaaatgaaataagatttattgaaggaaaatatgatactgaaagtttttataaggtaaataaagggttggaagaggaaaaagaaggtggagttagatgttttaattgttatgaattaagacttaatgaagctgctatcatggccaaggaaaaaggctatgattattttacaacaacattatctataagccctcataaaaattctgctaaattaaatgaaattggtagaaagttatccgaaaaatatgatgtaaaatatttatattctgactttaagaagaaagaagggtataaacgttctatagagctttctaaacaatataaattatataggcaagattattgtggatgcgtattttctaaaaatgaaagaatgagttatgataatgaaaaaaataagtaagcaattattaaataaaatataataaaaaaagtacaacagataaatacttaatattatataataatacaaaggagaggattaatgtgtctgataaaattatagattttaatgaattaaaaaataaggtcaaagataaagacatagataaattcgaagagtatatttattctatgtactataaactggctgagggcaaaatgaatatgtctgatttctccaaaaatatattagcttacatggaagaaaataatatatcacaagataaattaataaatatacaaaaaaagtttttagaaagatatggagtagatccttctttaattcaggagcaatttaaaatacccggatttgatatgggtggaagcaatttagactatcagactattaaaaagacaatgggctttcaagaaaaatacaaaagcagaatatctaataaaacaatgtccgaatattttataaaaaacgagaaaaatgatttgaaagtacttctagagaatttagatgttatattagttagtgagaaaagtatagacttaaatgataatgagttaaatgaatttttatgctcatataaaaaagtgatagaggataagaaaataaatatagtaatatgtgaaaatgtaaaaaattacgaatattaattttctaggtgaagtgtcaggtaaggcatatgaaattatataacaagtctagaactatcacggaatgttcttgtatgcagaaaagttctgtattgcagtatagctgttcttttcgtaagtgcatagcttctttttgaaatgtatatatctgggaactttaaaaagttaagggtgagccataaagaaattagggcgtaccctttatttttttatatttatgtgccgagcataggtatgtgctaatgatgatatcatgtgatttggctgatatagtatcaaccactagtctatgagaagaatgtgtccgatgtgaataataatatgaaggaaaccgaaggtaaagtcgtgcctgaggtataaaactcacagttgaggattagatttgttgcatcacattacctacgatttctataaatatttactctataaaggtgaattgaatattataaatttaagtaatccttcagaaaaatccataatatcatctttagagatatttgataaatcgtgagcgctgctatttaatgtaatcagcttggcttttgagtgctcctgaacacatttatcgtagagttccttcgagctttcataaggaaccatattatctgaatcactatgaattatcaaagtatttggattcgatttgtttacatagtttataggattatatttttttattacatcatctttatttgaaatagaagcaaaaatttttgttaaatcataatttaaatcttgagtatttagtagacttaaatcagttgggcctgcaaaatcgattaagtattttacctttgaagaataattgcttaaatctctatcatctataaactcatcatcatcactataacttgccataagagaaagatgcgcaccagatgaaacaccaatgatgcctatttcacttgtattaagattataggaatattgattcttatttatccaccttatagtatctttaacatcagaaatttgcttggtgaaattttctttttctttcataagttcataggaagtacttatgattgtgtaaccttgttctctaaaagtatctagtacaggactcaacgcatcaggaatatttttatctccataagcccagcttccaccatgtacatatacaagtactggtgaagatttatatacttgatttattgggccgtaaatatctaattttaagggaacaccattagtatttttataaataacatctttgtaattcattgaacttgatgatttttgagtattaaattcttgtattgtccatgcatgattttttaaagaaatatatttatcagcaattctatacgataatataattcttttgtagaaaaataaactaaaaataaaaagtacaataaataaaattaagaaaaatcttttaaaaaacttcttcattaaatactgcatgcctaatatttaataaaatttacttaggtatttataataatttaggcatatctcctttctgaaaagattttataatatcaaaatactaatataggcagtctaaagaatgtgtatagaaaacaggcatttaagtacacttaaagactatattagaatttctatattaatataaatttatactataaatttatattacaaaagatttaaataattcgcaaattaagaaatttgcaatttattgggaaaaagtagatgcatttttaataaaaataaaagtataaataatattttatattagtatgaatatgaataatatataagaagagacgattagttattaacctttttgaaaggagaagatatgagcaatccttttggtatacttgtttatttggatgaaattttagttagaaatttatcctctttagtgttaactggattcatagaaacaataactagaactcaagcttttgatagaacattatcagcagggtttcatgagggagatagaatagaaaattctaatcaaggaagtgttacaagaattgagagaaaaggatttaaggataaaaatgaattagatgctaataataattttgagcatcatcagattgagaaagaaatagatgcaaggcaatgtgtaagagaggaaaggcaagtcaaaactacttatactacattcgtattaaatggaagtttaattaactacttcaatgaaaataagcagttgcagcataaaaatgaaagagatatagaaaataataacatatatccaggagatctaattgagattgaaggaacaatcacaaataaaagcattatgtcttatattgaaactctaattaatttgataacaatatttggagcagaatacttggatgatttaactaaagagtgtaatgtgaaaataaatttttcaatgtgtttaaaaatgctgacttatatgaaaagtattttagaaaataataatactacagatttaattatgaagtgtggaagcggaacaataatattaaacgtcaataaagataattttatgaataataaatttaatatatttgataatataaattgtccgtgtagggttataggaaaagtaataaaaacgtgcactgaagaacacgattctataagtttacttagaaaaactggtcaagaacagttttatgagaagttttttgagcaatttactcctcttatagagtgcttagagaaaaacgatatttttgtaccagagtgcccagatttaagaattaatgagtgcgcaatccaaataatgccattaaacatttacatgtaaaaaaatattatgattttcatgtgttttatggaaaaacacttgtttatctataggatacatgataatatatattacaggtggaatatgtttatatatacttaaatttgttaattaataaagatatattttcatatttaatacaattttgaggtgatattagatgaagtttagaagtactagggggctggataagaatatagaatctgctagagcaataattaatggaatttcaaaagatggcggattgtatgttccagatgaatttcctaaagtctatgatgaattgaaggaagatacgcatattaaatatgaagatctagcatttaaagttatcaatgagtttttcacagatattgatgatgcggaattaactggggcaattaatgacgcatataatgatagattcagtgtggaagtaaagaacaattttttagaattatatcatggaccaacttgtgcatttaaggatgcagcgttgttatttttaccacaaatcatgaaaagagctaaaaagatttgtgatgttaaagaggatataacaattcttacagcaacatcaggagatacaggaaaagctgcacttgaaggttttaaaaatgttgatggttttaaagttgtagtttattatcctaagaatggtgttagtgcaattcaggaaagacaaatgtcaagtcaagaaggaaacaacgttaaggtcattggaataaaggggaatttcgatgatgctcagacaggcgtaaaagaaatcttcggagataatgaattcagagaagggctatctcaaaaaggatttatcttatcatcggcaaactccattaatattggaagattagtacctcaaatagtgtattatttttatggatatttcaatttagtgaaccaaggagtaatacaaagagatgatcatataaatgttgtagttcctacaggaaattttgggaatatattagcaggatattatgctaagcaaatgggattaccaatagataaatttatatgtgcatcaaatgaaaataaagttcttacagatttctttgaaactggggtatatgacaagaagagagaacttattttaacagaatcaccgtctatggatatacttgtttcatctaatcttgaaagattattatttgaagcaagcggtagagatactgaagttgttagtaaattaatggaagatctaactactaaaggtgtttatgaagtgaatgaaaaaattaaaagcttcataaaagaattttatggaaactttgcgactacagaagaagtgtatgatgctataaaggaagtttataagaaagataattacttgatggatactcatacagcagtggcatatgtagttaaaaagaagtatatagaagaaactaacgacgacaaaccaactttaatactttcaacagcaagtccgtttaaattcccaagaagtatttgtaatgcacttgatattgatgtagagggattagatgattttaaagtactaaataaattatctgattcaacaaataatgaaataccaaatagtttaagcactttggaaaatgcaaaagtaatacatgatgaagtttgggataagagtgagatgagaaatgctctattatcttatttgaattcataggtgataaacatatgattacagttagagtaccagctacatcagcaaatatgggacctggattcgacacgcttggaatagcattaaatttatacaatgattttggattcagggaaatagaagatggtttgaagtttaatggaatgccagaagagttttgtaatgaagataatattatttacaaagcaatgaaatattgttttgataaagcgggctataaaataaaaggattagaaataagtgaaattaaacaaagtgttccagtatctagaggtcttggaagtagctctacatgtatagttgggggactagtaggagctaacgaaatcttggggaagaagttttcagaagaagagttgttggagatggctgtagaaattgaaggacatccagacaatgttgcaccagccttacttgggggcatggttgttgcaatagttgatgaaaataagacctattatgataagatagatgtaaaaaatggaattaagtttatttcgataattcctaattttaggttatctactgaagaagcaagaaaagtgcttccgaaggagataagtttaaaagatggagtatataatgtatcaagagcagctcttatggttgcatgtttttctagcggaaaatatgaactattaaggtatgcatgtaaagatgcctttcaccaaaattacaggagtaaattaattcctggttttgaagaggtgtataataagagttatgaattaggagctctagcttgctatttaagtggagcaggtcctacaatcatggcgattatcgatgaaaaggatgagcgctttagcaataagcttaaagaattcttgcaaataaaaggattggaatggaacatattagagttatctttagataatgcgggggcaaccattatagaaggtacaaaatgatgagtggagattacttggttatagataaaagggttttacctgatgtttatgaaaaagttctttttgcaaaaaaattattaaaagatggaaaagtaaaagaaataactgaagcagtaaaaatagcaggaataagtagaagtgtttactataaatatagagattttgtatttgattttgcagaaacttcagagggtagaaaagttacctataatattatatttaagaatgaaaaagggcttttgtcaaacataagcaattatattacagaaaaaggtggagatatcttgacaataaatcaaggtatacctttaaatggctatgctaacttaagcataaccatagatttatctactgtagatggagatataaaaacattgacagagggcttgcttaacataagaaatgttgaaaaagttgagtttataggaatggaataggaagggaaaccttcctattttaattatatcaattttaaaaaatattaataaaatataaaacccgtttaaaataacgtgagttcgaaaagctagaatattttatgggtaaatatggttatgaaaaaaagcaaaaaagtatccttgtaatcttgtggttcgatattccaattattccatagttagatacttgtccaacttaagagaaggtttcttaggaagaaaactatacgaaatcaatcctgaaactatattaaccgcaaaattagtaaaacttctatgtcgattatgctctatctgacatatattttttagttggtcatttattgtttcaatgatagctcttttcctaagaagaattttatcctccattaacattaatttatttttcatgtttttctttatctttgttataagctgaatacctttggaatacaaaatatcggagatctttttagataaataacctttgtcaccaaaaagttttccaaataaatcttttgctaatatttctatagtcttaatttctctatcatctacatttcccggagttagataaaaagagagaatatcccctttatcgttaacaacaagatgaagcttaaaaccataaaaccagcccgttgaacttttaccacgttctgcaattcctttaaaaaccttatgagagtgtattcttctattatggcatacattcaaagttgtagaatcgataaaagaaattcctgtgcacttgccagttctaaatttcatcatgtataatagtagtgcaactaatgattgttgcattaattcaacaaacctattgtagctcacaagcttaggaaaatacggtttgagaacagtagacacatgctcaatataatatgatttaaaagttctgtaatttgacaaatgaaagtagatagttattgtcataacttcgcttaatgataaagttttacttttaatcattgcaaatttgcggtcgctattttccgttaggaaatgacttttacagtaattttcaaatccaatacaaaaattgtctacatcataaaatatttctactaataagttttgcataaaatcccatcctttgttttatttatttggtcgcacttatataataaaacattttgatgggattttttatcccttaaatttttccatcgaactcacgttaaaatatgctagaataaattaaagtcagtagagacaagttctatagggaacaaggaaggttttataataactataaaggttagaaatatcacattattcagaaatggaggtgtgttttttattacacaaaattaaaatggagtgatttcatgattagaaataaatatgaaagtgattatatgattaaaaagcttggattaaatagaatgtcagaaaagatatttacggataattcaactttagatgaacttaaaagttatttagaagagaatacctatgaatattataatataagagataaatctgtatcaggaggtaagtttttatatatgcttaccaaagagcaagtattgtcggaaggcaaaaaatacaagagatatgcagtatatgagagtttagctactgcagatgatagattaatattacaaggtgatatagagatagacagagattttattatgagagcatcgttaagtgatataaaaggaatatcaaatagaattgcaatggaaaagccaatatataatatttataattatgatctaaaagaaaaaagagatccgcccataattggattatctaaagttatagattatatatcacaaaattttttaattgacatggtagttgagttttctctgtttgaaataccagtaggaataaatcaagaaaatataataatttgggaattaagaaactactaaaaagtgatgactaaaaatatcttgaaataaattccaagatatttttttaatgtctaggaaagtataaaaattccgaacgctgaaagcgacttgtagacttgtattgagaagctatatgtggtaaattgatgaaatgattaagagtaaattaagaagaatattagaagaaaattggaacgaattttataaaaaatatagaaatagaataagacctaatgtcattgcagaaataaaaaaagttatgaaatgcaaagatataaataatggctatattgaattaaaatgtcatgattgtggtgaaataaagaaagttggttttacatgtaaaagtagattctgtacatcatgcggtaagatttatgttgataattgggttaacggaatgctaggaaaattaataaatgtaaagcataggcacatggtgtttacaattccggaggagcttagaaattattttggaagagaaagagatagattgaggttacttccgcaatgtgcagctaaagctgttacgagttggatgagtgatcaaaataaaaaagaagaatttatccctggaattatatcagtgatacatacttttggccgggatttaaagtggaatcctcatgtacatatgatggttacagaaggtggaaagggaaaagtaacgatatggagaaattttaaatatttttcatatgaagcattacgaaagagatggcaaaaaatattactagatgcaataataaaaagagaaggaaataaagatagttttagacgattaaagaacaagatatataaaaataataaagaaggattttatgttcatgctaaaaatgaaataaaatcggcaaagatagcagcaaaatatatagggagatatgttggccgtcctgcgatagcagaatcaagaatacttgcgtatgatggtaaaagagtaacctttaaatataaaagacacgaggataacaaagaagtaatagaaaaagtgcccgtgtttgagtttataaaaaaagtcataatacatataccagacaaaaactttaaaatggtgagatactttgggctatattcaaggagaagtaaggataaagatcaatttattaagatgatagataaaaaaatagtacaaattaaaaaatccatagaaaggtgggaatataggattcttgcctcttttggtgtagatccgtgtaaatgtcctaaatgtggaagtaaaatgaaatttaacgatatagtgtatccacgatacggctcgatgcgagaatattttaaaaagaaatttataaatgaaggtaaagaaaagttagaaaacattctggaaatatatgcaattgcaaaaggagttctatatggtaaaataaagccgacaacaacatagttggagggatactaagtgaaagacattgtatcatgtaaatgtttaaaatgtggaataacagaaaatatacctagggaggttgtagaatactttgatgagatggatcaaagtaacatagatgaaccgccttgtttttcatgcgaaaaatgtggcggtactatgagaccaaaagaatacgatggggtatattggaaaaaatataagttgtgataagagaaccatagagaaaatgcaatctctatggtttttgctttaattattaaaaatttctccgaatgagcgtggcgcagccactttgttctgaaaaaacaaacatcattttcttgtaactcatatattaaaattttttcaccatataaataaaaggcactcattatgagtgcctatcaataattagagaaagcaaagtggaaagtttgaactctaacttatttaattttattatagcataaagaggggaatatatgaatgcccgaaataaaaaaacaatttagcataaactctataattatttatttcgagataaattaaaaaaaacacaaaaatattcaagagtttagaaaatcctagtatgtttaaactacaaaaaatacaattattttttttagcttacaagtaatgacatgaatttacatagaaagatgctataatttaattgtaaaagggttttaaaattaaaatggggtgagataatgagagtattatgtaataattgtggtttgaaatgtcatattaaggaatggaaggaaagacttgatgatttgttggctaaaaagcaaaataacttattggatgatgaagtgatttgcttaagtcaatctattgatgatttaatatctgactgtatattttgcaatacaagcaatttatatagttcaaatcgaagaaatactggtgaaagagattctattttatactactatggagagcagcatttaattgttaatttatataattacatagaagaaggaataagaagtaaagaaaatatctatatttctgttgagaaaaatctttataagagattagaaaattatcttataatcaatagaattcctacagaaaaatttaaatttatgtgtttaaaagacatgaaatcaatgattgagaataatgataagtctattaaactaggggaagaaaaatctaggtggatagttcaaccatctttgcaaaagcattttttatatgcagagagtactttaaacaaacatactaaagatttagatttagacattctatatatatatgatgcttatgagtatattcatagaaatgttaagagtgagttaaactctaaactattaggaaaatgtcaatattcgctaaaaagagaaagtcatgaattatgggtttaacagtaatgtagaattaagagtcttatatttaaggctcttttttgttatggactttagtctgttgagctcgcgcgcgtgcgaaacataaaaccacctgctatgcgggtggctaacatgtgttatacaaagaaactcacttttccgagttataatagaagtgttcaagctactattataggaaggaaaggtgagttccatggataaaagtctagcacacacaagatggatgtgcaagtatcacattatatttacgccaaagtttagaagaaagataatttacaataagtacaaagaaagtattaaggatatattgaaagatttgtgtaaatacaaaggtgtggaaattatagaggggcacttaatgcctgaccatatacatatgttggtatcaattccgcctaaaatgagcgtagcgagttttatgggatatctaaaaggcaaaagtgcactaatgatatttgagagacatgcaaatttgaaatataagtttgggaatagacatttttggtcagaaggatattatgtgagtacagtaggactaaatgaagcgacaattaagaaatatatccaagatcaagaaaaagaagatcaaatgagagataaattaagtattaaagaatacgaaaacccttttcaagggtagcgagtaatacgttggcctctttagaggcagcaaaagtaacaaaggcaaagcagcttgaacgaagagaaagctagcgtctttaggcgccagccagtaaaaaagccttataggcgcagagcaagccacccgttttacgggtggttatgactaggtaattgctgatggatgcgaagtttttacaaaatataatgaaaatacttttattctcgtaggaaattaaaaagatctttagttgtgaaattggattattttaatgaattacgtaatgtgaaaatttcaaaatgatgcaactaagtatataacatatcgccttgcttatgttaagtagaaaaatattaaaatttcagaaaagctcctaaaggaggagcttgtatatacatttataattataaagaatatttatcttccatttatattcattggtgaaaatgatatgctgccatcaccaattattataattttataatcatatttcataggacgcattacatatttcattgaatgcccttcaaatcttatagattgttgtatccttttgttgccgtcgaatataatcataaaaacttcattaggagaaaggttctgaacattatacataacattttgcatgatacttaaatccgatatggtataaaatccttccgaaaagttttgtgggagagatgcagcattagcagttgctttattaatattaaatgtgattagtaaaataatagaaagtgcaaaagtaaattttttcattatttaaccacctttcataatttaaattcgaatattgaaccgctcaaattttattattagaatttagataaaatatataacagaaatatgttagaagattaatatgaatactaggaattaatgaatataaagtaaatgtagctggtaagattgattaatagttatggtattgcaacgaatagaattacaataagtattattagagactgagaaagtatagattgcttaaaactgagttttaaattttttgcgaaataccaataagctaaaaacatataaataaaaaaaggagaattagttccaaatagatagcccccccttagaaatgtgtaggggatagactggggaggtattttgtaagataataaattaaattctattaataaaaatttaaagaaagttgaaatactgttagaaattatggaatactattatatctagtcattaggcgtgatatatttaatattgagtaaaaacataaattgaaaataaatgctattataccaataaattatgatataatttatcagtgataatagaaaataaatataagactattaagttagttttatcgacatgaggtgcatgcggtggaaaatacagaaattgactcgaaaattaatatggttgaaagaaaaataggaagaagctctaatttggagttactaagaatttttgcgatagtaatgattattgcacatcattattctgttcatggcggatgggatattcctaacgaactaagttataataggataattgtccaattaataagcttaggtgggaaattaggtgttaattgctttattttaattacaggatactttatgattaactcgaaatttaatataaaaaaattctccaaaattataggacaagttttcttttattctgtagctattatgctagtttttaaattattcggaatatctcatataggaattagagaaactgctaaatcattttttcctataatattttctaagtattggtttgctactacatatgtggagttatatatactatcaccatacctaaataagcttattaattattgtacagaaaaggaatatcagagattactgattatattaataataattttatctgttatacctacttttacgaactccttacctggaattgataatttaccatggtttgtatttttgtatttggttgcaagttatataagaaaatatcagtataatttttttgatagaagaaaattacttttactaatatttatcggtagctacatgttaattatgatttcagtagttataattgatttattcgctttaaaaataccagattttccttttgatcctacatttctaagagagatgaattcgctaccaatgtttatttgctcgatttcattatttctttattttaaaaagctggatatgggatcaaaaaagataattaataatatatcttcaactacatttgggatatatttgattcatgataataatcttgttagaagttacttatgggaacatattgctaaaaataattccttttacaattcaagatggttatcgcttcatgctatagttactatttctcttgtgtttttcatatgcatgattattgaaggtgtgagaattaattttatcgaaaaaccagctatgaagttttgggataaagaaatagagagcaaattcctaaataaaagtagaaattatatagatagggctttctcgcaacatatctcaaactaaggctgagaattttattgtctagatttcattattgttatgaactaaaacttatattaaattattaaggtatgcaggcttagaaattaccaatatttctgggtttgcttttttatttcttagataactatatgaagctaaatttgcgaacagtgagttcattaactgtgagtataaattacgggaagactggttactctgaatcagcttaatatttagttggagatttattatttatagtattatggaattatggagctgttttaagtaagtaatttcatgagtggcttaatgattaacgagattaatcattaattagtataaactttgaatgagtgagtatactaaagtcaagaataatatgcaaaatagaaatttagatataagtacataagatattacaaaagaagattttaggactatataccttatataatatagattaatgatgataatgtttagtcatgttagtctatatgttatttagaaataatatttatatatcattatgtggcttactgatacaaatttttaacatgagttaaatctaaagaagtgtaaggagagataattatgactaataaacgtaaagtcactaaaaagcaaatggcatcattaggattaagaaagactgaaaatggagattatgattacataaatccaaatgatccaaattcaaaatataaacctgtaagaaaagagccaaataaataaggctcttttttattttaattaaatttatttaaattctataagcagtattgtcagatttcataataacaatacgaattatattatgaaaagcaaaaaaacaactgacagaagttttacagtacttattaaaaccagggttttaaatttattaagaagagtaaacaaaaaatagttactttatgtaaaagaaaataactattgggagggattttataacttggagaataaactagttgaaaaattagatgatttaaatattagcgatactgatttgttgctatctgaagatataaagttatcactagatgatatcactataaaaagaattgaaaaattagttggcaaaaaaacaggttattataaatcaaataatatttttaaagaaaagataaattatattttagggggaatttatatgaaaagaaaaatagctttagtactatctgttgtagctctttcaagtttagggggaggagtatatgctcatgcaaaaacgactcctgtagcatatgtcagtgtggatattaatccaagtattgaattatcagtaaatacatttgatcaagttatttcagcagaatcatataatgaagatggtaaaaaagtgttggaagatactaatttagtaaatagcgatgttgatgatgcagttaagaatattattacaaatgcagtttcagatggatatataaaggaagacggtacatcggcagttgaaattactacagctacggataaagataatgtggcaacgaagttagatgaatctttaaaacaaattgctgacaaatcattagaggaaaataacatagaagcaacagttgaaactcagaatgttgctctttcaagaagagatgaagcaagaaagttaggaataactccaggcaaactaaacttgatacaaaaactacaggaattagatccaactataaatgtagaagattataaatcaagttctgtaaaagatatacaaaagaagactaaagaattaaagaagatcaataataatgaagagactacagttaaagatgatgcaaatactggtggaaacgtagaaggtaatactaatcaagatgcagttgcagaagagaaaataagtaattcttcttctaaatcaaatggaaatggaagtatcaagaaagaagagaatagtgattcatctagcaaaaaagaagaaaatgccacagaagttgaaaaatcaaaagataattcagctaaaactcaaaaacaaagtgataacggtaattcaaactcacagaatgataataaggataaaaataaaaataactaaatagtttaaaatgagtagctaatatagaaaataataatagctactcatttttgtatgtatgcgataacaaatttgaatttataactctattaaatcaagtgaaagagcagaataataaatttaattgaaatatatatcagctaaatagtataaaaaattattattgaagaatcactagtaatagcattaataggatttatctatatatttaatatatattacatagaacaggagagaaaagaaaatataagtatttatcattaataatgtaaaagttaatatattttttgaaatttattgtcagattttatttatgtattacgaactgtataatatataacgaaattttaggggaagaaggtgcgttttgatttcggatattgaattactaaaccttttggatacgaaaccggaaataggccttaagaagctgatggataactatatggcacttatttacacaataatatttaataaactttctggaatgtattcaaaagaagatatagaagaatgtgtaagtgatgtgttttttgaagtatttcattataaaaatagaattgatttagataagggatcaattaaagcctttttggcaattatagcaaaaagaaaagctatagatatgtatagaaaaaataaaaataataatcatcttccaatagatgatgtagcccaagaattacatagtgttgtagatgatgcagcacattcgattttattaaaagaaagcagttctgagcttataaatgctataaaatcattaggagaacctgatagcgaaataattataagaaaatattacttacatcaaagctcgaaagacatttccagtgatctgggtttaaaagttaatacaattgataaaaaagtttctaggtgtatggaaaaattaaaaaaattattgggaggtgggagataaattggatgacaaattatttgaattattggatgacttaaacattagtgatactgatttattattgaatgaaaatattaatctatctatggacttgtcttctagaaaacgtattgaagaatctgtaaaggaaaaaacgggatacttaagcaagaaagatacatttaacaataagatgaaaaatattttagggggaacttatatgaagagaaaaatagctttagctgcatcaattgcagtagcatttagtttaggaggaggagtatatgcttatgctaaaactccggtagcatatgtcagtctggatattaatccaagtgttgaattaggagtaaacgcttttgatacagtggtatctgcagaagcgtataataaagatggtgaaaaagttctagaaggaactaatctggtaaacactaaagttgacaatgcagtcagtacagtaataacaaatgccatatcagatggttacataaaggaagatagtacaaatgtaacaacctctgcggcagttgaaattacagtatctacagataaggatggcttagcagataaattaaatgaatctttaaaagaaactgcagatgaaacattaaaagataatgatttagaagcagaagttgaaactgataaagtagcgcttgcaagaagagatgaagcaaggcaacttggaataactccaggaaaattaaatcttatacaaaagcttcaagcactagatccaagtattaaggtagaggattataaattgatttcggttaaggaaattcaaatgaaagctaaagaattgagaaaaatgactagaactgataatgatgctgttgatgtagataattctgtagatactaatacgaatgctacagatagtaatactaatactgaaacagatactaacacaagcaatagcaatcaggatgctgatgtaacgtctgaatctacagaagatattacatttacacaatcatcaataggagaacaaaaaactaaagaagctaagacagaaaaaagtaatgactcatggaatgagaaaagtaataatggcaatttgaaaaaagaagaaaatagcaatgcaggtattaagcaagaagaaaatgaagataagaaatataaaaagtcttcaaatggatctgaaaaaagggatgctgaaactcatggaaatagtaactcatcaaagtcagagaaaagtaataatggcaattcagattccaaaggtaaaggaaatgataaaaataaataggcagtaatttaaactgatacattttttatagagatgggataattttaatacgtaaattatcctgtctctataaacattttaagaactttaaaattctagaaaaatatttttcataaatttaataacctgagttctaaatctgtataggggtatcatatatttatttagtattaacggatacaattgcaaggtaaatttaaacttattttgtgattgtatttgttatttcaacgtattgaaaaataaaagggaattcaattttgagtagtagggggatgaaaaatatatttcctttgaaagatggacttaatacgaggatgttttataagttatatataagcaagcgtgtttaatgtactcataggaataatttgttgtacagtgtgaagaggattgaatatataaggttaaggagtaattattaaaggggagagtttatatgggaaaaaaatatgtaatgtttgttgatgaaaggggaattagaagtttagataaaagcggaaatttctcaatggtaggattgatttttgaatataattactgtattgatttaaaaaacagtgaatgtgaattaaaaagaaaattaaatgaatataagaaagaaagttttatggagagtgattctaatataccaatagatagcataatattggaagataaagtatacaggaatgttgacaaagccagaatgaatgagttcgtaagcaaactaccaacattaattagcaaattaagattcaaaataatttcaagctcaataaaacagaatttaagtgaaacagaggattcatattcaatagtgacaaaaagacttttaaagaagttctattcgtttattactaagaatgatggagaatcaggcgggatagttattgaagcaaaagtaggaaatagaaattgtagtataatgcaaaatttctttgatatatataacaatagaaatattaatttaagtgaacaagataacgttcagaataaaattaatacgtttattgtatctgacaagaataataaaatttatggttctggaatagagatattaaatataataactaatgtattttttagagttttaaatggaaatagagaaattaatgaggaattaatatcatacatagagtatggtaacagggacaagatatttagtgagcttaaacataaggtatacaacgatttagaaataggaatatcacggactcaattacaagccatttcgcacaactatattgaaggttttaataaagaattaaaattactaaaagagcaattaaaacttaaggataatagaataaaagaaaaggaaaaagaaattagtgaacttaccagtgagattaaattgttatctaaacagttagagagagttttagtgaacagaaaaatgataatatagtatcacgaattttcttatatgtagatattgaattttgtttgacaaagcgattacaatttcaaagaattatttattcgcaattatatagttatatgacaaggtagtatattagaatttataatagaaacttattatattaaattaggaaagttaaaatgcctgaaagaatcttaaatgaagctttggggcattttgttttgtaagaagaataaagcaaaacattagaattttatagatttcctcaataagtattttaaatttctataaataagggaagcatataaaaaataagttttttagtaaagaggaatttatgaataaattatcttatgaaaatgaagtggaagattattctgaaaaatttaaagatttcaagatgaaatctattcaagacaatgttaatcttggcataacgctttatgtacctaagggtgaaataaaggggatatttcaaatcagccatggtatgatggagcatagaaaacgctatatacggtttatggattatttaggatcaaatggttatatttctatagtacatgaccatatagggcatggagaaagtgttatcaaaaaagatgattatggttatttttatgataatggagctaccaatcttatagaagatttacatcagataacactatatatgaagaaaagatacagggaatatccttattttttatttggatttagtatgggatcactaattgcaagagcatatttaaaaaaatatgattatgagctagatggtcttatactatgcggttcaccagtaaagaataaagtcatcccgtatattaaaaaattatgtaaaattatagagaagataaagggagatcattataggtcgatttttatacataaaatacttcgaggaataggtgataatgttataacgacctcagaaatagaaagagataagtttatgaatgatgaaggctgtggatttattttcacaataaatggatttgagaatttatgtaacctaataaaaattgactatagtaaaaaagactgggcaaaaagaaacttaaatctcccaattctatctattgcgggggaagaggatatagttattataagtaaaaaaagatttaatgaattaacaaggtttatgaaaagaatagggtatgagaaagtttttactaaaatatattcagataaatatcatgatcttttacatgaagtaaataaatcacaggtatataaggatattttaaattggatggatagagttaatagtgaaaagaaaacttgattttattaaggatactatttcaatatgtaggtttatttcaatgataaaccacatttattattatactaagccaatggccaaattaggataaaaatttagcaactcaattataatatatataattgcaaagtactattatttgggtttataatgctgttaaaggatgtgttaaatatgaaaaaaatagtttttggcggaggctgcttctggggtgtagagaaattcttttctatgataccaggagtattagaaacagaagtaggatatgcaaatggaaaaacagaaaatccaacatatgaagaagtttgcaaaaatgatacagacttcgttgaggtatgctacataacatacgatgaaaaaaaagtttcgcttgatgaattattagataagttttggagtatcatcgatcctacgacattaaataaacaagctggagatgttggtactcaatatagaagtggaatttattatattgatgaatctgatgctgatacaattaatagaagtaaagcaaggattcaagaaaaatgtgatgttcaagttgtaactgaggtaaaaccgctaaagaaatattacacagcagaagaatatcaccaagattatttagaaaaaaatcctactggttattgccatattaaatttaactaatattaaatattgatgagttagcgtatttatactggtaacttattaaaaactatcttaagaatagaaaactattttaagatagtttttttgtttttggggaaaactcacttggagattttttaaacaggtttttaaatgaacgtagaaaacatgtataatcattaaatccacatagtaaataaactttcgtaatttgctcaccactgcttataaggtcctttgccattagtaatctcttttgatttacatagttgtgaagagtatatccagtttcttttttaaacttatgcataagataatatttgctaatatagaacttttgagataaagtctccgtagaaagattttcagataaattattatttatatatttaaggattttttcaatttgtttatcatatttgagagatgcttcatcatttatatacatgttgttaagatgcactctatttaagtatacaagcaattgaataaataatgaattacttaaaagtttactaccgaaatcttgtgagttaaaggaagtcattagtgaatctattataaacttaatgttatcttgtaatttgctattaagtctaataagattgaaacttttttcattcgccagtctaaaacaagtagataaatcacaattttcatagttgtggttttctataaaatcagaattcgcccagataataattctttcataaatttcagaagaatcaataataggtttatgaacatcatgattatttacaagtagaatatcccatggttttaagttgtatgcttttccttcaattaaataagttacttttccagataaaaaaattattattttattaaagtcgtgataatggaattcaaattcttgattttttttatcttttaaatgaaataattgaaaatcattgtttaagtagcctgatttattactatttttgttcatagttgaaaactcccttgaaataactttaattgtattaattaaaaatatcagatgtaaatatatattcaattaactctaaaatgtgtaatataaattttagttttatatatgtagtaataataaacttacatttaaaactccagtaagctaagtgcacaattaaaataataatgtggaaattcaattgcaacatatatattaaaagcataaagcactttttgcagtatatcaagcaatatatgcactatttaatgcgaaaatgttgtatataatgaaaatataagaagttaagtaattcttggaggaataaaaatgaagttatacaatttattaaaagatttagattacgaaataattagcggaagtgttgatatagatgctagtagcgttagttatgattctaggaaagtgaaaagagattcagtgtttatctgcatacagggggctaatgcagatggtcacgactatatagatgaagcaataaaaagtggcgctttagcaatagtgatacaggaagaaattaaaataaataatgcaaatataacagtagtaaaagttagaaatactaagttagctttagcaagtatagctaacgtgttttataatgaaccttctaaagaaattaatttagttggagtaacaggtaccaacggaaagactaccgttatacattatataaaagatatattagaggcgtataaaaaaagaacagctgtaataggaactttgggatatgaatttaacaaagaaaaggcaagcatacaaaaggttaatcctacaacacctgaatcattagaattacaaggattatttagggagtttattgataaaggtgctgaaaatattgtaatggaagttacttcatctgcattagcaaaacagagagttgagtattgtgattttaatgttggagtatttacaaatctatctcaagaccatcttgaagaacatggaacgatggaaaattataagaatgaaaagataaaattgtttaagaaatgtgagctaggcgttataaatctagatgatggaatagcagaagaaattatagaaaaggccaattgcaagattttaacttatggaataaataaagaggctgatattagagcaactgagattagatatagaaatgattgcataatattcaaaatcaaatttagggacataaaatggcgctggtggtgtattacagatgtaaaagtaaacattcctgggaaaataactgtatataatgttttagctgctataggagcttgtataggtcttggtatggatatgggtgatattataagctgtttatctaatctaaagaatgttccaggaagactagaaatggtgaaaaataattctaataaaaatgtaatagttgattatgcacacactcctgatgcattagaaagactattaatgatggcgagagagactactaaaggcaaacttattactgtatttggctgtggtggagatagagataagagtaagagaaaagtaatgggaatggcggcaggaattttatcagattattgcataataacctcagataatccaagaacggaagatccaataaaaataattgaagatattgaagaaggaatggaagttataaattcaacttatgagaaaattgctgatagaaagaaagctattgagaaagggctaaaacttttaaaagaggatgatttattaataatagcagggaaagggcatgaagactatcaaataataggtaaggataaaatatactttgatgatagggaaattgtcaggaaagctctgggatagtgcgaggatctataacttaagtatcaaaatattagggggcgagaaaattgaaatttttaaagaactataaatcatcatttattctagtgttatcgatattattaggcggggcgataggtattataatgggagataaagctaaaatatttgcaccactaggaaatttgtttttaaacttaatatttacgatgttagttcctatagtattctttagtattgcttctgcgatagctaatatggataaatcaaaaaagcttggaagaatatttataataacgttaattacatttggaattactgcaattatttcaggcataataggagtaattagtttcaaaatgtttaatccagcagttggattggatccatcaatgtttaataatctaatgaccactaatagtatagatacacctaaaagtgtaggaattttagaaaagattgtttcgagtataagcgtaggtgatttttctgaacttttatccagaaataatttgttatcactaatattattttctatattaataggttttggaactatgttgtctaaggaacaaggcaaggcttttgcgtcatttttaagcagtggagctacagtgacaatgaaagttgtaaatataattatgtattatgcaccaattggacttggagcttattttgcaaatgtaattggacaattaggcggacagatattaagtgggtatgcaaaaatatttatactatacttggttgtctccataatatacttctttgtattcttcagtatatatgcttatatagcaagtagaaaagaaggcgtgaaattattttggacaaatgcagcagaaccttcaataactgcattagcaacatgctctagtgctgcgtgcataccagtaaatataaaagcagctaaaaatatgggggtatcagataccttggctaatataataatgcctctaggagttaacattcataaggatggttcagtaattggaggaatatataaaataatgttcttgtttgctatatttggccgagacataaatactattagttcattacttcctatattaggagcagggcttcttattggtgcagtagttggagcagtgccaggaggtggggcgattggtgaaatgcttatattaagcatatttggatttccacaggaggcattagccataatgcttgtaatagcaacaataattgatgcgccagctacattattaaattcatcaggaaatactgtctgtacaatgataatatcaaaatttatagacaagaaatttgctgagaattaaattggaagctggatagcatattcttcacaaggagtttgcatacaaaaactgtggagataataaacaatttgcattcatgtacgttctaaaaagtatatttcatagaaatttaatctaaactattagttattataaactatataattttaataaaaaacttcaaccgtattttggttgaagttttttaaaataatttttaattaaggtaaatgaaagaaaataacaagtccaaaatgctatgattattttttatcaggcaatgaagtagattggacttatataaagctattaggaaaatctgctgacgcagcattatggaaaataggtgtggcagatggatttgttattttttgattatgcctaatgtagtataatctatatagtatcgaaattaatggaatttatagaggagtatgcagaatgaaaaaaagttttaacatagatatatttttggaaaaatatcctcaggctaaagaaataatttctaaaaataatattaatattgaaaatcttaaggaaatctacgaagactacataaattataaaacttcttatgaaagccaggcagcatttatagcaaacattttacgatcgcagagaatggtgcattctgttaaatcaaggattaaagatcctgagagattaatagaaaaagttataagaaagacagaagatagaaaaaataaatatggagatgattttgaatttacagtaaataattatagaaatgaaataaatgatttaatagggattagagttatacatatatttaaagaccaatggcagggtatacacgattttataataaaaacttggaatgtaactgagattactgcaaatgtaagagaaggagataatatagatgtttttgatgatcctattatagaagtaaggtcaaaagcctctggatatcgatcagttcattatttagttgaattttatccaatcaatgagaaggtaatagcggagatacaggttagaacaatttttgaggaaggatatggggaaatagatcataggttaagatattcccataatgaaattccggaaatacttaagtctaacttgatgctctttaatagaattgtaggaagtgctgacgaaatggcatcattaataaacaatttaagtaaagagtggggagataaagaagtttattataaaacaataataaaagatcaggaagcagaaattaatagattaaaaagcaaaatgacatggattgacgtagaaaaagattcttaatgttaattttgagaaattaaatctgagaatacaaaatattataactaaaaatggaggagtttgaagtgaagacaattggatttataggtgtaggtgtaatgggaaaatctatggttagaaacctaatgaagaaaggatatgaggtatctatttatacaaggacaaaagaaaaagttcttgatgttataaatgaaggtgccaaatggtgcgatgatgttaaaagttgtgcaaataataaagacgtcataataacaattgtaggctatcctaaagatgtagaagaagtttattttggggaaaatggtattttagagaatgctgaaaaggagtcttgtataattgacatgactactacaagtccgaagctttctataaaaatttataatgaggctaaaaagagaggaatatatgctttggatgcaccagtatcaggaggagatgtaggagcaaagaatgccacattatctataatggttggtggagatttagaagtttttgaaaaacataaagatgttttatctgcacttggaactaatataatttatgaaggaaaagctgggaatggacagcatactaaaatggcaaatcagatagctttagctggcgcgatagctggagtgtgcgaagcaattacgtatgcaaaaggagcaggattagatgttcagactatgcttgatagtataagtgaaggtgcagcgggaagttggcaaatgaaaaatatggctcctcgtatgctaaaaggagattttgaccctggtttttatataaagcattttattaaggatatgaatttagcaatagaagagtctacggataattccataaatttaggtgtattaaatgaagtgctaaaaatgtataaaacattagataacgataatttaggtgatctaggaactcaaggccttattaaatattacgaaaagtatagccaaaattaatactaagaaattataccttaataattctctctctctatcagaagcagtaagtaagaaattcttatttactgcttcattttatatattaaaaaaaatactatgcagggattatttttttgttataataaaacatgtatattacatagtaagtttataagataataagggaagaatatattttaaatggatctttagacgtttataaacttgaaaggaagaagacttatatggaagtttattttgataatagttcaacaacaaagccgcttggtgaggtaatagatgaagtgagttttggtatgaaggaattttacggaaatccgtcttccttacataatttagggttgaaaagtgaaagaaaacttaaagaatgcagaggaatattagctaaaactataaacgcaagtgaaaatgaaatacattttacttcgggtggaagtgaaggaaataatttagttctaaaggggcttttgaaaagcggaactcatcttattacaactccttttgaacatgcttctattttgaatactataaagaaattagaagaaaataatattaaagtaacatttttagagataaatgaagatggtaagattaacttagaacagctaaaaaaagccataactaaggaaacagtattggtttcaataatgcatgtaaataatgaagttggaataattcaagatttaaaagaaataggagacataataagagcaagtagcaatagaactaaatttcatgttgatgcagttcaaagctatggtaaattacctatagatgtaaagaagatgaatatagattttctaacagtaagtgctcataaatttcatggacctaaaggtgtagggtttatatatataaaaaatactagttctttatcaccgttgatagaaggtggatctcaggagtttggaataagagcgggtacacaaaatatacctggaattatgggaatggctttagcttctaagatctcaaatgataaaattaaagaaaattacgaaaaggtatttcagataaagaaaaaattcgtggataaattaagtaacatcgataatataaagataaacagtctattaaatagtgatttttcaccttatatattgaatgtttctttcagaggtgtaagaggcgaagtattacttcattatttagaggaatcaggaatatatgtgtctacaggatcagcgtgctcttctaaagaaagagagagaattggtggcagttatgtattaaaatctttaggattaactaaggatgaaatatcaggaggaattagattttctttttcggatgacaatgatgaatcagagatagattatgtagtagacattttagaaaaaggacttaaatttttaaggaggataaaaaaataatgagagaacttattttagtaaagtatgcaccagaaatatttttaaaggggttaaacagaggtaaatttgaaagaaaattaagagataatatagctaaaaagcttgagggtataaaagctgaatttatacacgacagtggaagatattttataaaaactgctgaaatagaagaaagtattaataggatcagtaaagtttttgggatacttgaagtatgtttagttagagaagttgacatagattttaatagtatacaagaggttgcgttagaaaaggttagacaatcagaaggaaatacttttaagattaatacaaatagagctaataaaaaatttgaattgaattctatggaagtttcaaggaaagtaggagcatatgttcttactaatttagacggagaaataaatgttgatgttaaaaatccagatattttaataaatattgaaataagaaataattatgcttatgtttgggcaaatactgatataacaaagggagcagcaggtcttccgtatggaatgaatggtagcacaatgttaatgttatctggtggtatcgattcgccagtagcaggatacatgatggctaaaagaggtgttgaagtaagttgtgtttattatcacagtcacccatatacatcggaaagagcaaaggataaagttaaagatttagcaaaaattttagctcaatatacagaaaaaattaatttgtacatagttccttttacagatatacaaatggaaattataaataaatgtagagaagatgaacttacaataataatgagaagatttatgatgaggatagcatgtaaacttgcagataaatatggaataaattcagtaagtacaggagaaagcataggtcaagttgcaagtcagaccatggatggtcttattgtaagtgataattgtgcagatagaccatcatttaggccgttaattgcaatggataaaacagatataatggaaatagcaagaaaaataggaacatatgaaacttcaattttaccttatgaagactgttgtacgatatttgttccaaagcatccgaagacaaatccaaaacttgatgcaataataaaagaagaagaaaaattaaatgtggatgaattagtacaaaaatcaattgaaaatattgaagttgtaacattttaaaaaagtacctcaggtttattttacctgaggtatttttttatatactttaaatgctattctaagtttcatttgttatttgttctttggatctatggtcaaaaatatatttatcaacgctaaacaagcctactgaaataattaatattactacggcaaaccaaattgatttaccaccaacgtgtaaagttaagattccgcctaaataagctccaacaataaagaaaaatattataactaagtagcggatacttttgagagcgagttttttatctttttctataaatgctttataagcagcttgagatgcagaacgcaaattacctgtgcacatagccgtactatatggggagtcaatcagttttccaaaagatgcgatttgaactgatgacacaaatgaaattggaactgttacaaatatgtgaggtactgtagttggtataaatcctataataaaaagcacaataatttcactgattagaattatacgttctgcattcgtagcaaaagtcattgatggaactttaatatcttttatcctttcggtaaatatcaccccgagcacgaatgctaaaataggtagtaaagctgtaattgcttggacagaatttctcttagtaagagctattccaagtaaaacaaggttaccagtttgagcattagcaaaaacttcacctctgcagacaaaggtgtaagcatctaagaaacctccaacaattgcaaggagaataccaagacgtactgattcagaagttttggtatggatgtgcattttttttattgcgtttatgtgtatatctttagtaatcaatgtaaaaagtctcctttcaatatatttccagtattaaaaatacttttacaaataaactattatattataacactaatttctatatagttaaaattaaggatataagaatatttaacatataacttataaatagttataaacgcataaaagcttttgaaattattgacatggtagaaaaaataagttatcataaattaaataataatttagcgcgctaaactgataaaatgataaaatgacatagaggttaagcaataagaataggtggggtggaaaatgaataagaagaatatacttccagaaggaacaagggatttagtattagatgaatgtgcagtaaaacgtattttagaaaaagacattgataaactttttgaaaaatggggatataaagaagttataacaccgacgctggagttttatgaaactttcaactataattcacaaactctaagagaagaagatatgtacaagttcttcgataatagggggcgtatattaattttgaggccagatatgacaattccaatagcaagagttgtggaaactaagctcaaagatgtagaattaccaataaagcttaggtatacctcaaatgtttttagagttcacgcaagtcttggaggaaagaggaatgaatatacagattgcggtgttgaatttatagggcttgaagatgaaaaatctgatttggaaatattagtattggcattagaagctttgaagaaattaggattaaatgattttaagcttgaaataggaaatatcggtttttttaatggggcatttaaaaatttagaaataaagcaggaatataaagaggccattgcgcagtttatagaagataaaaatatgaaaagcttggaggattatttagaggatttagatataaaggaagagtataaggcattttttaataagctgccttggatgtttggggataaacagatcttggaagaggctaaaaaattagcatttaatgaagagataagaaaaaatcttgattatttggaggagttatactatgaattagatttgttgggctatggtaaaaatgtgacgtttgatttagggatggttccgagactgaattattacacaggaattatttttagaggttatggagaaggtgttggcaatacattgttgagaggtggacgatatgataatttaattgagctctcaaaaaaatgtgttccagcagtaggattttcgatagatattgatgctgtgattccaactgtaaagtttaataaaatagcaagtgagaaggaaaatatatataagatatattataataaaaatgctagaattgaagctattaaaaaaagtgaagagtttagaaatcaagggtatattgttgatttattaccaaatgaagatgtaaaagaaataaaagtagttaagggtggggaatattaaaaatgagtataagcatagcattaacaaagggaagattagaagaagaaaccataaagatcttagataaggctaaattcgatccttcagaattaaaaaataaaggtagaaaacttgtgtttaaagataaaacgcaggatataaattactttttggtaaaggcagcagattcaataacttatgttgagcatggggtagctgatcttggagttgttggaaaagatactattttggaaagcgataataattgctatgaagttttagatttaggatttggaaagtgtggattcatagtagcatcattaccagaaagtgatattttcaaaaaggttggtcatataaaaataggaagtaaatatccaaaggttgcaaaggattattttaaaaagaaagggatggatgtagaagttataaaaatagagggatcagtagaacttgcaccaatattaggcctatgtgatggaattgtggatatcatggaaaccggaacaactttaaaggaaaatggtttagttgtcatagataggatttgtgaaataagtgctagattgatagtgaataaagctagttttaaaatgaagcagaatgaaatatgggattttatagatagaattaagaaagtgattgataattgacaaaattcgtgagatgttgataaaattgattatgatatcttgagtaattaataaaaaataataaataaaatttaaagagtattttttgttgttattactttttatcaagtcaaagggggggctattaattatatgttaaatttaatggagattactgagagtaataaagaaagcttaattagtgaacttaaaggtagagttacagaaacagaacaagagataatctcaagtgtaaacagtattctatcaagagtgaaaaaagatggggataaagctttatttgaacttacgaagtcatttgataaggttgaacttgaaactttagaagtgtcaactcttgaaattgatgaatgttttaataaagtggagaaagagttcattaaagcattagaagaagctaaagcaaatataaaggagtatcacgaaaaacaaaaatcaaatggatttttaatgacaaaagataaaggagtatacctagggcagagagtattgcctttagaaagagttggagtttatgtccctggtggaactgctgcttatccatcatcagtgcttatgaatgtaatacctgcaaaagtagcaggagtagatgaaattattatggtaactccaccagataaaaatggagggattaatccatatattggagtggctgcgagaatagcaggaattaataaaatatataaagttggaggagcacaagctgttgcggctttggcttatggaacagaaagcattaaaaaagttgataaaattgttggaccaggaaatatatttgttgccactgcaaagaaattggtatttggagaagttgatatagatatgattgcagggcctagtgaaatattggttattgctgatgaaaaatctaatccgagttttgtagcagcagatttaatgtcacaggcagagcatgataaattagcatcatcaatattaatcacaacatcgaaagaattacacaaaagagttgagatggagttggaacgacaagtaaagactcttgaaagagaagaaataataagaacttctcttaaaaactttggaagcacaataatttgcagaacaatagaagaatgtattgacatttctaattctatagcgccagagcatttagaactaatggtagatgatccgatgaaatatttaggtatggttagaaatgcagggtctgtatttttaggaagatactgtccagagcctataggagactattttgggggaacaaatcatgtattacctacaagtggtacagcaagatttttttcaccgttatcagttgatagttttataaaaaaatcttctttcatttattattcagaagaagcacttatggaaaatggagaaaaaattataacattagcaagcaaggaaggacttacagctcatgctaattctgtgaaagtgagattagagaatgggaacttataatgagtatataaattcgtatgatgagtatacaataaatctagatagcaatgaaatttatctagagatggacccaaagatactaatgaaaatgaaatcttgcttaactaatgtacttttccataggtatcctacaaatgagatgactaccattaaagaattatatgcaaattatgcaaatatagagagcaaaaatataattgtaggaaatgggtctgatgaaatgcttgaacttgttgtaagtaaagctattaaaaatggaaagaaggcattaaccctaggaccagattttacaatgtatgatttttttgtttcaagatttggtggaaaattaaagaaatatgatataggcaaaactatgaattttaatgttcaggaatttataaatataggaaaacaagaagccgtagatctaattattttttcaaatcccaataatcctactggaattggaatagagttagaagatatagttagtattttagaagtttttaaaaatacagttgttcttgtggatgaggcttattatgagttctatggaaaatcaatgattccatatataaataaatataaaaatttggttgttacaagaaccttgtcaaaggcttgggggcttgcatcgttgagagtaggatttttgataactcatgagaataatatttctgaattattaaattataaaattccgtatacaataagttcgttttcgcaaaatttagcatcaatggctttgagatatccagaaaatgtcgttaaaaatgcaaaacaaatagttaaacaaagagaagaattatatgagaatttaaaagagattgaaaaaaacgctgcaatgaaaatacaattctatccgtcaaagggaaactacatttttggacgaacacctcataaggaagctcttattaagggacttgagagtaatgggataataattagaaattttaatgatgacagcttcagaattacagttggctcaccaatgcaaaataggaaagtagttgaaggaataaagaagatttttatatatgtataaatactggcatatttaggaaagtgatgagttggtatgttgatttatttaaatggataatcttctgcccaataaaaaataatcatatcatctgcatattattttcttagatatgcttgactatagaaagattatgttttatataggtattattaatatatagaattcttttggaacactatatttaaaatacaattattcgttttaaggagaattagtatgtcagatagaagctcaagaagagaaagaataactaaagaaactagtgttagggtagaaattgacttagatggaaacgggaatagtgaaataaatacagggattggatttctagaccatatgttaactttgttttcatttaatagtaaggttgacttgaatgtatttgctaaaggtgattcatatgtatgtgatcatcatacgatagaagacatcggaataacattaggggaagcattcaaagaatcactaggagataagcatggaataaacagatatggaactttttatgtaccaatggatgaaacgcttgctttagcgtcaattgatgtgagcaatagaccttttttggtttttgattgtgattttaagagagaaaaagttggagaaatgtcaactgaaatggtggttgaatttttcagagcctttgcatttaatgccggaataacacttcatttaaaagttttatacggtgaaaatgatcatcataaaatagaagccttatttaaagcttttggaagagcaattaaagaagctatatctagaagtagtgataatgatataccatctactaaaggaagtttataaaaaattataaaaaagaaaaatgaataattatgattattaataagatatttataaaatttggggaatagagatgttaatttatcatttgttattcattttaatctttattataggggggggttatataatgatagttataatagactatggaatgggaaatttaaaaagcgttaagaatgccttggattatcttgagattgaaaataagatttcatgtaatgaagatgaaatcagagatgctgatgcgttaatattaccaggtgttggagcgttccctgatgctatggagactattgaaaaattatctttagacaaaataatatcagaagaagtaagaaagaataaaccgcttcttggaatatgtctcggtatgcaattattatttgaaaatggatttgaaggaattgaaagaaaaggcctcggcttattaaaaggtaatattattaaaatgaaagatgataaagttaataatataaagatcccacatatcggttggaatgatttggtgtttagtagaagcgatgaactttttagaggtatagatgaaggggaatttgtctattatgtgcattcttattttgcacaaggttataatgatgaagatttggtggcatacagcgaatacgggaaaaataagataccaggtgtagttaggtgcaaaaatgtaataggggctcaatttcatccggaaaaaagtggatctgtaggcttggctattttaaaaaattttggggagttgattaaatgataattttaccagcaattgatataattgatggcaagccagtaagattgtatcagggagattataataaaaaagaaattgttgcagatgatgtgtttgaaacagcaaaatcttttcaagatataggagcggaatatatacatttagtagatttagatggggctaaaaatggaagtaatcaaaatcatgagttagtaatcaaaattgctaaagaacttaatattcctgtggaactaggtggaggaataagatcttttgaaactatcaaatatcttttagataatggcgtagcaagagtaattctaggaacaatagcaatggaagatgaggagttactaaaaaaggcaatatcaatatatggcagtaagatagcagtgggaatagactgcaaagacggtaaagtatacggaagaggatggcttgcggctagtgagctagagtatatagaatttgctgaaaagatggagaatataggtgttaaaaatataatagtgactgatattagtaaggatggaactttagaaggacctaatgtggaaatgcttaaaaaacttaaagaaacagtaagtattgatattacagcttctggcggaattaaggatattgaaaatataaaagaattaaaagatataggcttatatggggcaataacaggtaaagctatatatgctagaacattgtctttagaaaaagcaatagaaatttctaaagaggggagataaatgaatgcatactaagagaattattccatgccttgatgtaaaagaaggaagagttgttaaaggagttaattttgaggggttggtcgatgtaggtgatcctgttgcgcttgcagaatattataatagtcaaggtgcagatgaattagtattcctagatataacagcaactcatgaaagacggggcataatggaaaaagttgttcaaagtgtagctgaaaaaatttttatcccatttacagtaggcggtgggcttcaaactttagatgatataaagttaatacttagagcaggagcagataaggtgagcttaaactcagcagctgttagaaataaaatgcttataaaagaaggagctttctattttggaagtcaatgtatagtattggcagctgatgcaaagaaaagaactgataatacaggatggaacgttgtaataaacggaggaagaattgatacgggattggatctgctaaagtggattgaagaagcaacagcgcttggagctggagaaattcttttaacatctatggatgcagatggaactaaaaaaggctttgatttggaattaacaaaagctgtaagtaatataactaatgttccagtaatagcttcaggtggatgcggttgcttagaagatttttatgatgtatttaaaaataatatagcggatgcagcacttgccgcttctctttttcactatggggaattaactgttgatgaagttaagagatatttacatgataaaaatatttcagtacgtatataagtttaatattatataaaaaagcaaatactagtatatacctgaagggagaagaattgtatggagagttgcaagagagtagagcaagttgattttgaaaagatgaatggattgattccaactatagttcaagattataaaactaaagaggttttaatgttagcctatatgtcaaaagaaagtttaaataagacattagaagataatacaacttggttttatagtagaagtagagatgaactttggaataaaggagcaacttcgggacattttcagtatgtgaaagaaataaaaatagattgtgataatgatactattttgatattagctgaacaagttggggctgcatgtcatacaggaaatagaacttgtttttatagagatttgtaatttatagatgggaagtattggaggattaaaaatggatgaaaatataagagctttatatgagactatattaaaaagaaaaacggaaggtgaagagggatcctatacgaagtatctttttgaaaagggaacaaacaagatattaaaaaaagttggagaagaatgtacggaagttataattagttgtaaagaaaataataaagaagaacagataaatgagatttgtgatcttacttatcacttacttgttctaatggctcaaatgaatatttcaattgaagaagtaggagcagaattggaaaagaggagaactaaaattaataattttaaaggtgagagaaaaccgataacaaatgtttaaataaattctatttgtaattaagcggtattataagtataaaagtaggattgtttgtctgaacaatcctttttttgatgttaagatgctgaaatctgaataacataagttttagaattacaaaattttaacggttgattgtcaattataagttgagtattataatattagataaacacaaagtaagtttttttattaattataggcaagaatacttataatataaaatataaaaaagaaaacctgtatatatagtacaggttttcgcatgtccactcgagaaaggaaataaatgaacatgttattgtgggtttataaaattttatggcgataaaccataaagtgtatgggcatatttgttacaatattgataatttaattatacaataatcacaaaaaaaaacaataattttttatattatgacaattaaaatataaggtgaataagtaaggtttacgttgccaagtaaatgtctttttgtatagaaaaaattataagaatttataggtgtataatatagatattatgtagaaactaatttaaatttgatatagatttagaagtgaaaatttttaattattatattaatatataaattcaatattaaaatatataatgacaagtttaaaaataaaataatatgtgtaggagaaaaaaatgattaaaatatataaggaagacttattgaaaaacactatagattatgaagagtattcagaaaatgtttgtaaattaacactagaggaacttaaaaaagaagggttattgcaatgcggaggctgctgtttaaagggagaaaataaaaaggataagtgctcaaattgtaatagcaagaatagttgtaaaaaataatattatcttttgatctagaattatatgattacaaaaatataaaatatattgtagatttaaacaaaagaataatatataatgaatttgtttatattataatacattagaaagatttggagggggccatctttgggaaagccaagtatttttagtagagaatatgaaaaaaggatgaagcgaagaagaagaaatgcgataataatatttttggcaataatattaataacatctgcgctatcaattaaaatagcgtataatccaatagattataaaaatattaaacaaaatatacaggcatggattgatagtgatactaataattcttcagaacaaactaaagcagaaaaagaagaaacatctgatgaaaaaaaagatgaggaggtagttgaagaagagcctcaaaaaccggtagaagaatatataaatataactctagcgagtgggaatattgcaaaagcaatttatgtagatgatgctaatgctggaaaagtttttaaaactttagatactaatgatagtggtgttagttacagcataagtccatctggtaaggaaataattgtaggagatacaaattcaataattactctatataatttagatggaacaaacaaggtgatatcaaaagatcaatatgtatctacaagtggaagtgtttttactaaagaagctgcaattcaatcaaatccaaaatacttatggaatcagaatccaaaatttattagtgaagataaaataatatttgtaactaataggccatattttggagctggaaatcttaaaaagtatgtatggatgactgatatttcaaataatgaagataaggttatctgggatttagctggagctaatatagaaattggtgaaaaggaagaaaaaggcgttaaaattactgttgatggtagagtttattttatcgatgtaaatggtaattatattcaatagagataatattaataaattatttgataagatttaagtgtttatggtataatgacttagttaaattagatgcacactatttaggaggaaagaataaaatgaaagctaaagtggaaaaaatagaaacaaatgtgataaaattagaaataagggttgaagctgaaaaattcgatgcagcattaactaaagcttataataagaataagagcagatataatatacctggatttagaaaaggaaaagttcctatggcaatggttaaaaagttctatggagttgaagtattctatgatgatgctgttaattttgctatagatgaatcatatccagaagcattaaatgcagaaaatattagacctgtagattatccacaagttgatatagtagaattaggagaaggtaaagaattagtttatactgctacagttactacttatccagaagtagaacttggagagtataaaggattagatataaagaagcctgtatatgaagtagaagatactgaaatagataagcaaattaaagaaatgcaagaaaaaaatgctagaatagaagttaaaacagagggaaatatagctaaaggggatatagctgttattgatttcaaaggatacatagatggagttgcttttgaaggtggagaaggctctgattattctttagaaataggttctggtactttcattgataattttgaagaacaattaatcggtttagcagttggggacaaaaaagaagtaaatgttactttcccagaagcttacggaaaagaagaattaaacggaaaaccagcaatgtttgaagttgaaattaagtcaattaaagttaaagaattgccagaattagatgatgaatttgctaaagatgtatcagcagttgacacatttgcagaattaaaagaaaatcttaaaaagacattagaaaaaaataacgatgaaaaagcagaaagagaattcgaagaagctgttataactgcagtaattgaaaactcaaaaatggatattccagaagttatggtaaataaagaaattgatgccatgatgcaagatcttgaaggaagattaaaatatcaaggtttaagcttagaacaatatatggaattcacaggaaatacaactgaaaaaatgagagactttatgaaagaaaatgcagaaagaaaagttaaagctgatttagttcttgaagctattgcaaaaacagaagaaattaaagcaactgaagaagaattaaatgcaagagctttagaattaggaaagatttatggaccaaaagacccagaaaaaatggctaaaatcttagttaagtctcaaagaaacatgattgaaaaagacataatattagaaaatactttaaaattcttaaaagaaaattgcaaataatttattttaatatataatataaaataagaatgccaattataaattgccagaaaaaaaaattttttctggcaatttattcaaataataattaacaaagtaataaaaaaaatatataattagaattagaaaaagtataatagtaaaaggaggatttatatggctttagtacctatggttgtagaacaaacaagtagaggagaacgttcctatgatatattttcaagattattaaaagaaagaataatcatgttaagtggagaagtaaatgatgatagtgctaatttaatagtagcacaattattatttttagaaagtgaagatccagataaagatatatatctatatataaatagtccaggaggatcaataacagctggaaatgctatatatgatactatgcaatatattaagtgtgacgtatcaacaatatgtataggaatggcagcttcaatgggagcatttttactttcttctggaacaaaaggaaagagatttgcacttccaaacgctgaagttatgatacatcaaccactaggcggttttcaaggtcaagcaacagattttgaaatacatgctaaaagaatattaaagatgaaagaaactttaaatagaattttaagtgaaaatactggtaagcctttagaaacaattaaagcagatgtagaaagagataacttcatgtctgcagaagaagctaaagcttatgggttagttgatgaagtaataactacgcataaaataggaaaagataaataagattgaattttcaatttatacgtttttaagtgaggtgaatgtatggctaaatatgatgaaaagaagcagttaaagtgttctttctgcggcaaaactcaagaacaagtaaaaagattaattgcaggtccgggagtatatatttgtgatgaatgtattgatttatgttctgaaattatagcagatgaattccaagaaactgttgattttgaccctaaaagtgtaccaaagccaaatgagattaaagaatacttagattcttatgtcattgggcaagaaagagcaaaaaaatctttagcagtagcagtttataatcattataaaagaattaatactaataaagaagatattgatgttgaattatcaaaaagtaacattttactactagggccaactggttcaggtaaaacactacttgctcaaacattagcaagatttttaaatgtaccttttgcaattgctgatgctacaacattaacagaagctggatatgttggagaggatgttgaaaacattcttcttaaactaatacagaatgcagattatgatgtagaaaaagctgaaagaggcattatttatatagatgaaatagataaaattgctagaaaatcagaaaatccatctattactcgtgatgtatcaggtgaaggtgttcaacaagcattgttaaagatactagaaggaactgttgcatctgttcctccacaaggtggaagaaaacatcctcatcaagagtttatccaaataaatacttctaatatattatttatttgtggtggagcttttgatggtgttgataagataatagaaaatagaacaagaaagagttctatgggatttggagcacaaattcaagctaaacatgaaaaggatgttggaagcttacttaaagaaattatgccagcagacttattaaagtttgggctaattcctgaatttgttggaagacttccaatactagttacgttagagtctttagataaagaagctttaattcaaattttaactaaacctaaaaatgctcttgtaaagcaatataagaaattattcgagttagatgatgttaagttagagtttgacgaaaagtcattaatcgcaatagcagaagaagcgattagcagacagacaggtgctagaggtttaagagctattattgaagatataatgaatgaaataatgtatgagataccttctgataatagaataactaatgttataataactgaagaggctattaaagagaaaaagcagcctagaattgaaagagtagaagaaggaaagattagacctactttagtaaaagctagaactaagaaagatattgaatcagcttaatattagcgagaataataagtcagtatatattttttaatatatactgacttatttagcgttttttataagtttttagtattttaaatattggattatttttatttatatttcaaaatcaagaatatatttgcaataataagcaaataatactaataataaaaattgaaggaggcaaagtatatttactttagtaataataaggaaataaaatgtatatattagtaaaggtaagtatatttaaagattatgacaaatatattaatgattttgcaaattatagttctaattctcatggtttatgttatgtgtaatgcaataagtaaaccacaaaaaaatagggagataataattgatagggaaaatactaaggaattaaataatctaaatagattaagacaaataagtttatctaagccacttactgaaaaaagtagaccatctagttttgatgaggtaatagggcaagaaaaaggtattaaagcattaaaggctgctctttgcggaccgaatcctcaacatgttataatttacggaccaccaggggttggaaagacggcggcagctagattggtgttggaggaagctagaaaatctaaactatcgccatttacagaaaagtcaaaatttgttgagttagatgcaactacattgagatttgatgagagaggaatagcagatccgctaataggttcagtgcatgatccgatttatcaaggagctggttctttaggtatagctggaattccgcaaccaaaggcaggagctgttacaaaagctcatggaggtgtattatttttagatgagattggagagcttcatccaattgagttaaataagttattaaaggtattagaagatagaaaagtgtttttagatagttcatattatagttcagaagatgctaatatgcctaagtacataaaggaagtatttgagaatgggcttcctgcagattttcgattaataggagcaacaacaagagcgccacatgaaatcataccagctataagatcaagatgtgttgaaatcttttttagagcattattgcctgaagaaatagagaaaatagctgaaaattgtgttaataaagttggattgcaaatttcaaaagatggtgttgaagaagtaagtaaatattgcacaaatggtagagaagtaataaatttgattcagttggcgtctggaattgctattaatgaagatagaagtgagattacattagatgatattaaatgggtattagagaatggacagtataataaaataatttcaaataagataccatctcaatccagagttggggttgttaatggattagcagtatatggagcaaacattggaatgttaatgcctcttgaagttagttgtaagaaagttacaggtagaagaggcgaacttaaaataactggaatagttgaagaggaagagataactaataacaataaaaaaataaaaatgaaaagcactgcttttgcatctgttcaaaatgtgcttacagtattggataatttattcgatttatcaactgatagatatgatatacatgtaaatatatcaggaggaattccagttgatggcccatcagcggggataagtattgcaacagctatctatagcgctataactaagcagaaaataaataggtttgttgctatgactggagaaataagcatattaggatctgtaaaagctataggaggagttaaggccaaaatatctgcagcctttaaagctggtgcaaaaaaagttataattccacaagaaaattatgatgaatcactacatgaaatatgtgaaatagaaataattcctgtaacaaattttaaagaggtaattaagttggctatagaagaagatataattaatgaaagcgagcgagaaatattatcagctgaaggcaataacattttgaataacttgtaaagttatatttttaattagtgcagtaaaatatgaataaatcttaatatttttacactttttcttttaaaattaatatattatgttataatagataaactaaatagtatttatagtaatgtatatgctgttttattaaacaaaattattgtaagtttacaaagcaagtgactaggtatacttgttttgtaaactatacaatatataatgagttttttatttttagaatcattgaaaaaaatatttattatgtgtatactagataagtcaaaataaataatgtaattaagatatggggggaaatagtactatgaaaaagctatatacgattccgctaattcctttaagaggattgactgtttttcctagtgtggttgtacattttgatgtgggaagagaaaaatccatagcagctattgaacaagctatgttagatgaacaagaagtttttcttgtatgccaaaaagattcaatgatagaagaacctaatcaagatgaaatatattcgattggaaccatatgtaaaataaagcaaatcttaaagatgtctgataatactattagagttcttgtggaaggtcaagaaagaggtaaaatagttaaatatatagaggaagaagaaagttatataaaagtttcagtaaaaaaattagatgataaagtggttaagaatgaggaattagacgcctatattaaattcttggataaagaatttatgaaactacttaagttaagtgaagataattttggagaagcagttaaatcaatagattcactggaaaaaccaagtcagtttgtagacatggtagcttcttatgcaataactgatgaaaagcttaagcaagaaattttggaaatagtagatataaccaagagagtagagaaagtattagaaagaattaaaatagagatttctatagcaaaaatccaaaaaaagattgctaataaagtaaagaatacagttgcgaaagagcagaaggaattttatctaagggagcaattgcgtgctattcaagaagaattaggtgaagatgatgaggacaagaaggaaatagctaagtatgaagaaaaaatcaagaaagctaaacttcctagtgaagtaaaagaaaaggttaattacgagttatcaagacttaaaaatatgagtcctacgtcatcagaaggcaatgttgtaaaggcatatttagactgggtattggatatcccttggggtaagaatacaaaggaaaatattaatgttactaaagcaagagaagttttagataatgaacactatggattggaagacgttaaagatagaattatagagtatttggcagtaaaacaattcagtaagtctcaaaaaggacctattctttgtttagttggccctccaggtgtaggaaagacatctatagcaaaatctatagctaatgctattaatagaaaatatacaagaatatctgtaggtggaatgaaggatgaagctgaaataagaggtcatagaaagacatatgttggtgcgattccaggtagaatagtctatgcaatgaaagaggcaaaatctatgaatccattaatgctttttgatgagatagataaaattagttcaagctataaaggtgatccatctgatgcattattagaaatattagatagtgagcaaaataaggattttagagatagttatttagaagtgccaatggatttgtctaaggttatgtttatagcaacagcaaactctttagaaaccataccaaggccgcttttagatagaatggaagttattgaagtatctggatatacgtatgaagaaaaatttaatatagctaaaaatcatcttattcctaagatatttaaagaacttgatattccacaagataaaattgagatagaagatgattctattaaaatggtcattgaaggatatacaagagaatcaggagttcgtggattagaaagaaaactaagttctttaataagaaaagtattagcagaaatgttaaaaagagaacaaaaagaattcttgattaataatgaaagcgttgaaaaattattaggtaagaagacgtttgattttgatcaaatagacaaagtggacaaggttggagtagttacaggaatggcatggactgcatatggaggcgatacgcttccaatagaagctatggttatgactggttcaggaaaacttgaacttacaggtaagcttggagatgttatgcaagagtcggcaagaacagcatacagttatgttagagctaatgcgattaagtttgggataaatgaaactttttataaggaaaaggatattcatattcacgcaccagaaggtgcagtgcctaaggatggtccatcggcaggcgtgactatggtaactgcacttgtatcagcactatctggtaagaaggttaagcataatgtagcaatgacaggtgaagttacattaacaggaagagtgcttccgattggtgggctaaaggaaaaatctttagcagcatttagagcaggagtagatactataataattcctaaagaaaatgagaaagatatagataagataccaaattcgattagaaatagcttgaatattatttcagctaaagaagttaatgaggtattgaaaaatgcactaattggagaggatactaatgagaattaagaaatcagattttattacgtcagcagtaaagaagaatcaatatcctatagataatagagtggaagttgcatttgttggaagatctaatgtaggaaagagttcgctgataaattcattaaccaatagaaaaaaacttgcaaaggttagtcagactccaggaaaaactagattagttaacttttttcttataaatgatgatttttatttagttgatttgcctggatatggatatgcaaaagtttcaaaggcggagaaggatagctgggggaaaactgttgaaatgtatttgactggaagagaacagctaaaaagagttgttttgcttgtagattcaaggcataagccaacaggtgacgatataatgatgcatgaatggataaaacactttggttatgatgttatagtagttgctacaaagagcgataaacttacacggaatgaattgaagaaaaacgagaaggttataaaagaaacgctcaaattaaatccagatgacaaattatattttttctcatcattaaataaagatgggaaagatgaactaatagataatcttttcttagaatttgcgacagatttagattagtaaaatactttttataaatttttgcataatagtaaacaaataacctcttacagatataatatttgtaagaggttatttctatttaagtaatgacattatttcttaaaatagttgataaaaaatttaaataattataagttataaaaaatagtgtcaaaaattttaggtaggaataatatatagtataaaaaagaaaaaaatatttccaaggaggaataaatatggagatgaatgatatcctaaatggtttaaattcatgtgatgacgattgttgtgataacagttctagttgcgggccaaacttcggaggaccaggtataggaggatttccaggagcaggttatggctttggacaacaaggatttggaaatgcttgtggctgcggatttggtagctggatttggattttattaatattattttactgtggatgcggcagaaatagacgaggaaatgactgctgctgtgaaaaaaaagaatgctgctgtgagaaaaaagagtgttgctgcggtagcggaagcggaagctatggtagtggattcttaagcaactgctcaccatatttgtttatattagtaatactattcctttgcaataataactttaatggtggctgtggaattggaggcggattcaatcctggcttaggcggaggatataataacaattttggttgcggtgctagctgctaaaattctgaatttttaggaaggagagataaatatgtctagaaagaagaataaatgttgctgtgaaaagaaacatcatgagtgctgctgtgagtctaataattcaggtttatttggaggcggaggaagtggctgcacaccaattatattcctattaatagcatgcggatcaggtttattaaactgcaataaatcttatttgattattttactattcttattatgtggtggctgtttcactgactttttaggaagtggaaaccaaggtagttattgctgctaggatagtggatagagggctttaaagccctctaaaaaaatgcataaaaatataaacatttttagaatgatatacatatattaaaaagagacaattttaagtgagaggattttaaaatggctaagcataaacatagagaacaaggtcaaacatcaagtgatactagttctaatattaatgataatgctagaaatgcaccttttggaattgatcctatgcagttaatgggattactaggtggaaattttgatatgaataatatggggaatatgttagcttcaatgaatacaaatggatttaatttgggaaatttaaattcaatagctcaaatgatggggttaaatttagataataacttatttcaaggaaatatgagtggaagtcaaagtaatgtaaataataagaatatgtattcaaatcctaaagaatattctagcaatacgaatcctaaaaattctgaaaatctaaatgaagataaaggtgttaaaaagagcaatgttacaaccaataaaaacattaaggataaggatgcgaacttagaatttttaatggcaattagaagctatgctcatccggatagaataaagtttattgatagaatcattgaagcttataagaatggagaactcaaagaagcgtaaaaaataaaaattattttttaaattgtgtatacaaaaagaaatcatgtcaataatattaatgtaatagagaaagtattctcttacaaacttaatggattattaagtaagacttgatttagacaggtatttccatctaaaatctagttaaacttatccagaagtttaatgccgtttggttaacatttaaagagtttgatgtgttaatggcagttcaactatcggataaattttttacttcattaagtaacccctcatccccctttaggccgctaatgcggccttttatatttatttagctttttgcatactatttattttataagaagaaccttgcttttcaaaatctattaataatatcaactcactcttattatttgtacctttaagattgcttttttcaaaagatagtctccaccttatagctgacggctctaatgagtcagtccacttataatcatagaaaaaggcattttgaaaagtatacgaataattatctttgtctaaactccaaagtaaagataaattctccttgtcaattgcagaagagaagatatcaggaagatcatcaactacgtaaggaagttcaactaaattaataaaacttgttgcagaatctaatgacggaagatttgtattatccttactagtatctaaaatatcattattaatgagcataaagctatttaatgaagaaagcccttctgatgatgatattgaataacattgaggagtcttagaatttttacaatccaatataccaaaaatattattattacttgaataaagcaaatcaaagtttttcttattccacttaaatacataagaggtagatttattatttttagagccaagaagtataatttcaggaatattatctctagaaagattatgaaaataaactttaggctcaaaatgaagattagtcgtgaaaagtgttttatcactaagttgattggaaagataatgatcattatcaaaacaatttatattaaaatcaaccttattttgtgagcttaataattgaaaagtatcttttttgccatcacctgttaagtcgtattgtgtattttgggtaatgtttattggagacatagtttgtaaagacttaaacttattagaaataaagtaaaccatacttaaaattaaaaataatgctgatatatatagtactgagtttactaaaatccttttctttaatattatgattttcattatgtatcacctcaataaattatatgttgatatagtgatgcatattaataatataaaagcgataaaataaaaaaagaccataacatcaagcaaaatatttcttgcctaagttatgatcaggatgaaaaagataacaattatttgcagttgctacaataaccataaaaataaaccttatttgaaacaatctgataatcagtatgctcttttgccaaagcattaagattatctagagatagatcattaaaatcatcgactcttccgcaacttaagcattgtaagtgaggatgaggtgatgaatttccatcatatctaaagtttccttcaccaacatttatttcttgaattaatcctacatcaactaatgtttttaatgctttatatacagtagctaaactcatagttggatattggatatggatatcagaataaatgacatctgctgaaggatgagaagtagtattaattaaatagttatatactgcaagacgttgaggagttaattttagctttttttctttaaaaactgaagctatttgatccattgtaaaaacctcacttctattagttttatgtatcgattataacataaaaatgaataaagagtcaattaattaattaatactatttttaaataattattattatttagagaaatattgttaataaaaatgcaaagaaaaagattgagcttgtttaatttgaacatttaattataaataaataccaaattttaattaattttctgataattgaatgaaaatatcaaaaatttgttgtacattaaagaaaagtctgttaaaatataactaagcagagtatgttaattaattaacatactacagtaattataattactatttctacaaaaaaatgataatttttattacagacttaatcaaaatcatttagcctatgataaaaatataaatagaaattgatgaggaggcgtatttttgtgggaaaatataaagttggggacgaattaataattgtaaatgatccaagcaaggataatgagaagttaaaggaattaacaaaattaactgttgatggagacttcgcacaaatatcttggggaataaaaatattagaagtagaatatgacaagccatatgtgacattaacttataaaaatgttaaaggcgagaaaaataaagttttttctgaatgtagagacatagagaactttgataaagaaaaagttttggaaaaagcattgcttagagcattccaaaatgaacttataaatatatcagttgttaagaatatttgtcaaatataattataaaaattaaggagcattataaaaaatgctccttaattttacatagaattccattgtaaaatctttacttttaagggcgtttgtaatataatgaattcataaatttatgagatttataaattattaggatgagaaaaggatggcgggttttatgagtaggtgtccattttggtcaacaacaaaagagaaagtggagtgttatagcgaatgccctataaaaagtgaagcattaaaagggcaagaggataagtgttgtgtttttaatgaatgtagtgagtcaaccagtatcgattttaaggaaattatgaaagaagactatggttttctaaatttgtctatatatgatgacgaaaagagaataaatattaactattaatgctaaagaaatatagattagaatattttcatatattctaatctatatttttatgaataaaagaagtatatttttatttaatctataaatatattataaaatttttagacaagttcactaattaacttagttttatatagtcttactcttgtgcttcataagagtttgtatatttatgaagaagagaatgttttaaagaccataaattttgtgataaatcaacataataagtatgaggattttcaaatctaagtacttcaggccacagcttatcagtttcaagttttgaaaaatcttttatttctaaaactgtaggagatttatacacgcactttccacttttgaatatttgagcttgaagttctttagtgtaatagttcttgattttttttctcttccatgtgtgaatagggtcgaatattattaatggctcattctcgttaatgttttcatctcttaaagtaattaaatccgcaatggccttatgagagtttttatcaaatattcttattatcttcttaaaacctggatttgttattttttcttcattttcacttattttaattttagggataatttcattatcaccttccaatgcaactaatttataaacgccaccaaaaacaggttctgacttagcagttataagtcgctccccaactccaaaagagtttatacatgcaccttgatctaatacatcttttataatgtgctcatcaagagagtttgagactacaattccacaatcctcatatccagcttcatctaacatttttctgcattttgttgttaggtaagtaatatcaccagaatctattcttacgccacgaggtattttaccaagaggctttaaaacttcgtcaaatacttttattgcatttggaattcctgactttatgacattgtaggtatcaataagtaatacgcagtcatctggataaatttcagcccaggctttaaaagcagcatattctgtatcatataattgaacccaactatgagccatagttccaacagcagggatattaaacattctgtctgacatagtgcaggctgttgaactacatccgcctataatagctgctctagcaccataaattgcaccatcataaccttgagctcttcttgaaccaaattccattacaggacgcccatccgctgctctacaaattctattagcttttgtggcaatcaatgtctgatgatttattgttaaaagaatcattgtttcaaggaattgagcttgaattacaggaccacgaacagttacaagaggttcgtttggaaatactgggtttccttctggaacagcccaaacatcgcaactaaaatcgaagtctcttagatagtcaagaaattcttcagagaaggcgtgtttatctcttagataagtaatatcgtcatcagtaaattttaaagtacttaaataatcgattaattgttcaactccagccattatacagtatccgccatcatcggggattcgcctaaagaacatgtcaaagtatgctattttgtctttaagtcctttacggaaataaccattacccatagtcaattcataaaaatcaactaacatcgttaaatttcgttcatccttaacattaaaactagatttattatccataataatctcctttaaaaaaacatgtaaataattttattttataattatcgtttaatccattataaattaaaatgcataaaactattgtacatctataagagtttgattacaatatagttgcttataacttaaaatcagacatatattaattttttgaatttaagtagaaaatattcagtatttatgagaggaaaatgaaattcatatagtaattatggaaagaatttaaaatatgtaagtcttatataaagaaattcataaatgctgaaatgtaaataggaatgaaagaaggagcattacagtggggtacgatcttgataaatatcagatggatgcagtaaaggcagaagaaaaaaatgtcttgatagttgcagcacctggatctggaaaaactacggttataataaatagagttgattatctagtaaagcataaaagagtagccaatggaaatataatagtaattacatttacaaaagctgcagctcagaatatgaagaatagatatgtatctaaattcaatacgaacagttcaccattttttgggacattccatggattattttataagatacttttgagatgtggaagaaatatcgatataattgatggagccgttgttcacaaaatagttagtaatattttaggcaaatactttgatgaagttaatgaagataagattaaagaagcaataaataacatttctttgtataaaacttcaagagttcctctaaatgagtttaagccatcaattgcaaaagaaatttttgaagaagcattagaaaaatatgaagagtataaaagagaacataataaaagagattttgatgatttagctatagaagtattagatctgctaaagaatgataagaatatgttgttgtcttataggaaattattcaagtatgttttagttgatgaatttcaagattgtgatgaaatgcaaatagatttcttaaggttaataaatgagggggaagataataatctttttgcagtgggagatgaagatcaatgtatttattcttttagagggtcaaagccagagtatatggttaactttgataaaatatttataggtgggaaaaaatattatttatctataaattatagaagtagaatgaatatagttgataaatcaaaagctgtgatagggtataatgaaaagcgaaataataaagatataaaatggaataaagagtgtgatggcattgttaagtggtttaatccatataatgaaaagatgcaggcagaaagtttgactgatatagttataaataataaaactttaggaattaattatgaagaaaatgcagtattgtataggactaatatagagtctatgtctgttattgatgtattaactaaaagaaagattccatttacactacttgatagagaatataatttttttgagcattttatttgtagagatttaatctcatacttaagattaagtgtagatgagttcgatagaaatagtttcttgcaaataataaataggcctttcagatatataagtaagggaaatttattttatataaaaaattatgatagagaagaaagtccattcactataatgattagcaaagatgatacacaaccatttcaaaagaaaaaactcgatgagctaagaaaggatataaactatttaaataagatatctttatcatcagcaatcgcatatatagtaatggatttaggatatagagattatcttcaggaatatgctaataaatttaatcaaagttttgaggatttagaagatataatagaagaatttaaattatcagcagaaggatataaaactatatttgaatttctagaacatatagaggaagtaaaacaaagtatagaggaaagtaaaagaaaaactaagagagaaggcgttatcttaagtactatacacggtgtgaaaggaatggagtttaaaaatgtctatgttataaattgtgtagaagaaacaatcccacattcaaatagtataaaagataatatagaagaggagagaaggcttttctatgttggaataactagggcaatagataacctttatctattttctccgagaagcaggaaaggccaatttaaggatgtttcgaggtttattatccaaggaaaattaaatgatatgccagttgatacttatggatacgagattggaaataaagtggcccatagaacgtatggtattggagagattgctggatttgatgaaaatgacaaagataagattaaattgaagtttgatgatggaatttttagaagtttttctttgaaaattttggttgataacaatttaatatcaaaatgttaaattaaaaagataataattaaatttaagttggtagaactccattcatgtaacagttgagaaattattatgtgaatggagttattttattgttaaattatttaatcacaagacttttataattatcttttgtaatcactttatcttttaccaaatatttatcaggaatatttttattaagcaaaagattctccataagttcctgagctgcgatttctccaacttctgtagcacttatgtatgcggaagctataagaggagagttttctttttgaaattcatcctttgctacatatccacctacccctacagcaacagcattttctgcaagaccagattgatccagtgcttttattgcaccaatggtgccagcttcatttgcagacatgacaaaccaattttttatatttttattagaggttatagttgaggcagcagaataaaaacttttttctgattgtccattatattcagcttgaaaaatattttctcttggaaagcttggaagtttatttttaaatgtttctaattgcccttcagttctaggtatgcaactagatacagaatccattgacataagcagaagtcctgaagaattaggatcacttaatttattattcttttctaaataatcaaccatgagactagtcatatcccttccgatttgattagaatctattccaacaaatggtgaaatataattaccttcatcatcagtgagaggatcatcgcaggctataacagcaatgtttgatttcttacatctatctatagtgatcttacttaatttttgatcaggaacgcatattaatataccatctactttttgagtaattaaattatccaaagcagataaatacacatcaggattcattttggcatctatagtaattacatcctttgctcccatagccaaagctttctttttagcagcttcactttcttcctgaaaccaagcttcatctaaagttttgtaaataacagcaataactaaatcagatttttttaagctctgtttagaagttgtagtatcacaagagaaagcaaaactagataaaattattattacaactaaaagtattttcttattcatgtaaatataaattcctttcacaattgttaaaatatatatttggagtagttataaattaactaaatcactatattagaaataggtaatatatagtatagatattatagatgaacatgtttaataaatatttctgatttcggtaagccatcacccaactatagatttttaaaataagagtctctaaattggttgggagtgatacctgtaacttttttaaataaaatactaaattgttgaggactattaaatccaagtttgtctgatatttcataaagcttatagttagtggataaaattatttctttagatttttcaattctagcttttaaaatatactgcgtaacattttcacctgtttcttctttaaagattctgcataaataaactttatggacattaatgttttctgctatatctgttaagcttaatgattgattaaaaagatttttgtttatgtaatctatggaatcagcaacctttttactatatttatttttaaaagagttattaaaattaatatttattattttagtgaagatctcaataaaccatccgctcatttcttcaacggtttcttttgttgataatatttctataggtaggtatgaagttgaaaaaatatcttcataagctatagaatatctattacaggttcttactactaaatctaggagcgaggagtttatataatttagataattaaactgcataaatcctcgtatatctttatcatataagtgagttaactctgatcttaagttttcaatattattttgttcaatagctatattaatggcattaattctttttgctaaagtatcagtatctaagtctaaatttttaacaaaggtattatttaaaattatagtatcattgcctaggaataccttcattttagaaagtttaaatgcttcatcaaagtatttctttattttaaatggctttttaaaggttgagcttacacttattgttaagctgatattgtgcatgagggaaatccttttccttatttcctgtgctaaataataacattcatttattatatctgcttcactaatggttggtgtcaagtgcacaatagctgtaaattctccattttcactataaaagcattctccaatgttgagttcttcgataatttcagaaacattttttattatttcattaagagtctttgtataaaattcttcatcttctatatacttaaaaaagttatctatttggatgaggaacagcacaaaaagttttccattcaaattaaggttaaggttttcaataaggctataagaatcatcttcgcttatatcattaaatataagctttcttagtgcaatatccttattttcctttaggaaacttaaaagtttatgctcttttcttatttcactcttttttatatttatattatcaagatcagttttagtctttgctaatattccatataaatcattaggtgttattaaatcttttatcaagtagtctgttactcccattttcatagctctttgcgcatacgtaaagtcctcatagcagcttaatattaaaaatttttgagatttatttattttctgtatttcttctattaaatctaaaccatctataataggcatttgtatatctgtaataataagatctggttttatatcagcatatttgtctagtgcttctttaccatttgaagcgctatatactattcgaaaatcagtttcttgccagtttataatgtacgagagaatttctcgtgcaggtatttcgtcgtctacaatcattaccttatacatgctgtttgcctccttttttagaattaaggcacattgacttgttattttcagaatgtgctctagtaaatgtatggaatattgaattctatacaagttccaattcctgatttgctgtatacttttaagtcatattcgcttccaaaatatagtctgagtctttcacttatgttatctaggcttataccattaaagcctttgtgagttgattttctcttactaattcctacgccatcatcgataatttttatttttataaaatctttttgtggaaatatatctatttttatagtccccgcacaacctttaggcactattccatgataaagagaattttcaataagtggctgaagaataagttttggcactaaacagttattcaattcttcaggaatattacatactagtttaactatatctccatatctatacttctgtatcttcagataattttgagtgcatgtaagttcatcttttaaggttataagttttttacttgttgatatgctttgtcttagcagaccattaaatgattgaataagttctcttatttcattttgattattttttatagccaaatagtttattgtatttagtgtattatgtataaaatgaggatttatttgtgattgcagtaaatccagctgggttttcatagattcaacttcaagcttcttgttttcctcttcttccttatagatttgttcaattagattttttatattgtaaatcattttattaaaactaattattagatacttaagttcgtcttcggttttagcttctagcttgtctggccattctccattttcaaacttattcattgcttttgtaatatcatatataggatctgtaattttccttgaagtaaagtggctgataaaaattacaactgcaatactaaaaataccaatacaataaattaaccatcgaatagaatcaaggtttctggttaaagaatccaaagatattaatccaataactctccattctggatatgcttctataacactattaaattcaatatactttacgttattaacatttacagtatcattattaactttttcaagcattatattgtcataatcaatatttcctattttataaatcagattaccatttttatcaacaataaaagtgctatcaaagactccgtggcagtaatcatctatgttcataaataaattctttttctttatattaatcataaggtagccgataagggagtagttttctttatccaaatacctagaaaaataagttatagttgttcttttttcatagtcggcattctcataattaaatggaaaagtattaggagaagaaaatttgtttgaatatccactttcaataaagttgtccaattctttatttccataaattaatttactataaggatattgtgaataaagaggatccattatttttttatctgttgttaaaggaattacagaaattatatagttactccatttacaatattctgaaagagtattaaaaaaatctgtattagtttctgaagttgcagagttatttctattaactttagacatataatcataaatatttttatcattttcaatcatataagaatcatgtcttatagaatctaaattttcattaaggattttagaaattacagttattttctcagtagcaacgttattatattgtttaattatttctttagaaaaaatagaacttatagaggacgtaacagctaaagttaatccaagtattataattgaaaaatatatagttattcgatttcttatctttgtgattttttttatcttcattatcatcaccttaggaaattatagcactaagattataggaattctagtgaaggcatttacttaataaggaattccaatttatgtactggctaattgtaaaataaagctgtagtgtaaaatatatcttgaattaaaaataatgaatatgtttaattgagtgccgtatggaaaccggagtaaagaaatgtttattatttttttaaaaccaactatgaaagaggaatatataaaatttatttttaattaagttaatattttataagaaaagttaataaataagatttttataatggaacgatttcaatataatgtgattaacgattacagaaaacaataacatactgtagtttacggaaatatgaacagtttatatttagagtacttattaaaatcaattgtagaattctatgtgagatgtaaacgttcgtaattttaaaggaggaaaaaagcatgttaaccgttatttcatttttattttgtatcgtattagtagcaacaattacgtatcgtaagctaaaggggcaaaaaaataattcaaaagattcttatttcttaggtggacgtagtttgacaggtggtgtgataggggcatctttactacttacaaatttaagtgcatctaattttgtaggtatgagtgctcaagcttactcaagcaatatgagtgttatgggctgggaagttggctctggtattactcttgtaattgtagctttatttttacttccaagatatttaaaacaaggggttacaactgtgcctgattttcttgaagaacgtttcgattcaggtgttaaaaagatagtttcaatattatttttattaggttatgtttcgaatttacttccaataactctttattctggtgctattgcattggctcaaatatttaacgtgcaagaaatgtttggtataagctatacagctagtatttggattatggtttgggttatcggtataataggatttatttatgctatacttggtggattaaaagcagttgcagtatcagacacgctaaatggtataggactagctattggtggattaatagtacctatctttggaataatatattttggccatggtagcttttcaacaggattatcaaatatattagttaatcattcagataaattcaatgctataggaacatcacaagatcctataccttttggaactttatttacaggaatgcttttagttaatctttattattggggaactgatcaagcaatcattcaaagagcattagcggctaaaaatttagcagaagggcaaaagggaataatttttgctggacttttaaaagtattaacaccattaatagttatagttccaggaatagtagcttttcatatatatggagcaggtgttgaaaatccagacttattatattcaagactagtaaacgatgtattgccaaaacctctaattgggttctttgcagcagctatgtttggatcagtattaagtgtgtttaatggagtgttaaatagtgcatcaaccctatttgcattaaatgtatatagtcctgtatttggaaaaggaaagtctgataaggaaataatatcaaagggtaagatatttggacttgtgttagctataatttcaatgactatagcaccatttataatgtatgcaccacaagggttattccaatacttgcaaacagtaaatggtttcttcaatgtgcctatattcacaatagtttttataggttatgtaacaaaaaaggtaccggctatagcagcaaaaatatcaataatattttttgtattaacttatggaacacttcaattaataataaaaccagaaatgcattttcttcatcaattaggaatcttatttgtaatcacatgtatgattatgctaatcattggtaaaataaaaccaagagaaaaggaatatgtattaaaagacaataaagtagtagatattaagccatgggaatatcgttatgaagcttgtggagtagtattattcttgatggtatcaatgtatgttgtttgctcaaaattaggatttgccagtggaaatggaataggaattagaacattggtacctatagccgtaattgcagtagtaatgtatggattagtgaaagtagtaaaggcaagaggtctaagaaagaaagcgggagataatgcagagttagtttacagaaattcagtagagaaattggatttttaactaaaaagtcattggggatttagtatagatgaacatatttaatccccattatgtataagcagaaattatacttaagcaatcatttagtaagttgataaagttagtactattataggagtttctgcataatatattatacccatataatttcaaacatctcttcagataaaatctcccaccttatttatttaagggggagattttagactttttgattaatgctttatttagaacaataaatgatgtgcattaaatgattaatattctcatataatattaacatccttttaatatttattttcttttaacattacttagctcctttataggagatttgtatttattataatcaaggcaaaaagctagaaagtttaatactttctagcttttatatatgttgcaataataaacttacatttaaaattctgataatctaagtgctaattaaaataataatgtataaattaaattgaggtatatatacattctaaaatattaaattatttacgtcttataaatataaacaaatcatacttttttgaaagtatggagtatgaaagaaagctaataacaccagttactaatgttaatattaaactatcaagaaatggaaaggtgacagctaaagaaggaattttagtctttagaaaagacataatcataaatggaattaacacaattccaaagattaataaggagcgaagtttagcactggatgtttccttatgtcttaaaatagtatttgagatgaaataccctatagatattagaatacaagtaattaaggtgctcattaatactcctttttcaaataaaacatctagtaaagtaaagaaaaaaactagtattgaaaaagtaaatattccttcaagtacttgttgaatagcagacactgaagaattatactcataaattaacttattacaaaacttatccagatccttgttgcattctaatttttttgttggaactttctgattttgagctgtaaatacaatatcaaaaatttgtttttctatatttcttggcaataaaaggctaaagttatgttgcatcaaacatgcttgtatagcatgataggtctctaagtagttattttttaataaagatatattaggtctactttgcatgttatccccctcttaaaaactaatgattttaatttggtatacatttatttctatagttaatcattttaatgtattaaaatcacggcaattacaccttctaccattttagcagagggaagttaataagtaaataagttgaagtaaggcaaaattgtgaacaaatattttaagtcattgtatgtaattggcttataatatataatttatagtatatttatgcaggagttaaaaatataaataaaacaataaaggttggttgtgtttatatggaattaaaaagatttaatcaaaaggatataatttttgccttagatataggaactagatcaattataggtacagtaggaatagtaaaagataagaagttccaagttgtatgtgagaaatatttagagcatgaagaaagagccatggtggatgggcaaatacacgatattaatttagtggcgtctgttgttcaaaaagttaagaattatctcgaagatgaacttgaaatacagctaaatgaagtatctattgcggcggcaggtagatttttaagaactattgatgtaagagcagatattgagcttaatgatgatgaagaagttaataaagaaatcataagaagtcttgaattgagtgcagtaaaaaaagcagaagatcagatagcttctacaactgaaggaaaactatattgtgttggatattcagttagaaatttctacttaaatgggtttttaatatctaatttattagggcataagggagaaaacataggggcagaagttatagcaacttttttacctagatctgtaattgattcactttatgcagtaatgaatagggttaacctaaaggttgtaaatttgactttagagcctatagctgctatggaagctgctatacctaaaaatttaagactgcttaatatcgcgcttgtagatataggagctggaacttcagatatagccataagttctaaagaaagtatatctgcatatggaatggttccaatggctggagatgagattacagaaactattgttcaagaatatttagtagactttaatacagctgaaaatataaaaagatctatagtaaaagaagaagaaataaaatatattgatgttctgggtatggaaaatacaatatcatcagaaagtgtatacaaactaattgattctattgttattaagactggagaagaaatatctaaaaagattttagaattaaatgggggcaaggctccaagtgctgtatttttagtaggaggtggagctcatacacccggaattttagaggctattgctgataaattaaaattaccacctcaaagaatagctattaaagataggcaggcagtgatagagtgtgtttcagataatgatatgggatcatcaggtgtaactgttttaggaatagctttaacagcaatacgtagtatgggaaatgattttattgatgttattttaaataatgatccaattagtttatttaactcccataaacataatataatggatgtattgcttcaggcgggaataaatccatcgctgcttataagcaaaaatggtaaaagtgtcaggtttaactataatggatgtaaaagaattgtttttggtgaatatggaactaatgcaaagatcacaataaatggagaagaagcaactcttgaaacagaagttaaagcaaatgacaatataatactagaatacgcacagaatggaaaagatgcagcacctaaattatcagaaaatataagaaacataaattcagtttctatttatttagatgataatattatgaatatagaacctgtaacgcttgttaatgagaaaatagaaagtttagattatacaataaaaaatggtgatgaaataagagtattcttgccatgtaaagttaatgaatttaagaagtatatattaaaagaagaagtaatattactaaaaggtggagaatacttagaagataattatgaaatttcagaaggtgatcacattgtaattaaagcaatggattcatatataggacatgaagaggctgctaagttaaatgataaggaaaatcataaagagacgacacaaatacagaatgtagaaagctgcgatgaagatactgaaaataatgattcagacaaaatcgaaatagcaattgctaaagaggaaattaataatataacagttaatatcaatggagaaagcgtagtattgaaaggaaaagttcaatatctaatagtagatatatttgaatatatagattttgacttaacagttccaaaaggaataattaacttgaatttaaacggggaaaaggcaccatacacagcaaatataaaagatggagatataatagaagttttttggagtgataattaaagtttattatttcttagagctaatattttaaatttaggtatattcaaaattaaaataagtcgatatacgaatttattttgtacaatcggcatattatcttctttaaatatgcttaaaaatctaattattattaaatatggagggattagagaaatgatagattttaaaaaagaagctaatcttataaaagatgaacttataaaaataagaagggatttacatgaacatccagaacttggatttgaagaggttagaacatctaaagtaatcaaggattttttagaatctaataatattccttatattcaagtagccaaaacaggcgtatgtggaattataaaaggtacgaaagaaggaaataataaaactatagccttaagaggagatattgatgcacttcctattaaggatatgaaaacttgcgaatttaaatcaaaaattgatggaagaatgcacgcttgcggacatgatgctcatacaacaatacttatgggagcagcaaagttattaaatgataataaagataaattttctggtacagtaaagttattatttgaacctgctgaagaaactactggtggagctactcctatgataaatgagggagttttagataatccaagagttgattgcgttattggacttcacgttgatgaggaaacaaaatgtggcactataaaaataaaaaaaggtgtagttaatgcagcctcaaatccgtttagtataaagataacaggtcaaggaggtcatggagcatcacctcatactactattgatcctattgttattgctagtcatattgtagtagcacttcaaacaatagtaagtagagaaatatcaccagttaatccgattgttataactgttggtacattacatgcaggaactgctcagaatattattccaggagaagctactttaagtggaatgattagaacaatgacaaaagaagatagagcatttgcaataaaaagattaaatgaaattgtaaatgggattgcagttatgtcaagagctaaagcagaagtaaaaatagaagaaagttatccttgtttatataatgatgatgagtttgtagatttaataagtgatagcgcaaacgaaattgtaggaaaagaaaatgttttagaacaaaaagcgcctaaaatgggagttgaaagttttgcttattttgcaaatgaaagaccaagcgcattttattttttaggttcaggaaataaggaaaagaatactactgagccagcgcatagtaatttatttaacatagatgaggattgtcttccgattggagtttctattcaggctttggcggcatttaattatttaacaaagtaatagtattattttgcaattttatgtaaaataaattgacaatatgtttaaaaaactagataatgctaagggtaataaatttaggagtgattatatttgaaaatagaaataggtccaaacgaggcaggtcagagattagataaatttttaagaaaattattaaaggatgtgccattaagcgcgatctttaaggctttaagaaaaaaagacataagggttaatgggaaaaagcaaaatgagaaatacttcttagaagaaggcgatgtagtagaaataaaatacatccaaagtaataaagaagacaaaaaagaaaaatttattaaagttgatcctaaaagaatcaagattgcatatgaagatgaaaatgtagtagtaattgaaaaatggccagatgtattggttcattcagatagcaataatagtgaagaacctactcttacagattatgttctttcttatttaaatgacaagggtgactatattccagaaaatgaaataacatttacaccagcagcatgcaatagattagatagaaatacatcaggaatggtcatcttcggaaagactttcgaaggtttaaaagccataaatgaagccattagagaagatgaaataagaaaatattattacgctttagcaaaaggaaaaataagagctggactttatgaggcatacatattaaagaatcctgaaactaacacatctaagatatacgatactgaggttaaaaactcaaaaaaaatatcaatggaaataagtatagtggaaagcaatggtgcatattcacttttagaaatacacttgattacaggaagaagtcatcaaattagagcgcatttagcacatttaggaaaccctataattggagataataaatatggagataagaaattaaattcattttttgaaagtaaatatggtctaaattttcagtatttatatgcttataagttgaattttagaaaaattaacggaaaattagaatatctaaaaaacaagactatagcattggcattacctccaatatttaaaaaaataaagcaagatgtatttaagttctcacttagataggaggtaattatggaagagcaatcagccaatagtagcagaggctttttaattctttcaatagcagggcttttaaccaaagttatatcagttttttatataccactgcttcaaagaataattggattagatggatatgggatatatcagaattgttatgaagtgtttttatttgtatatgcagttacaaaccttggtactcaaccagctattgctaaggttgttgcagagcttacagcattgggaaaaccaaacgatgctgtaagaactcttaaaatatcaagaactctcttatcattagttggtgcggtattaactatttttttaatgctgtttgcttttcctattggaaatatgattggaaatccagcagcttcttacggaattttaatgcttgcaccaagtatatttgttacatcacttttatcatcatatagaggatattttcaaggaagaaatagcatgactgcaattgcggtatcacaagtattagaacaagtaataaatatcgcaattagtttagcttgtgcatatttcctagtgcacataagtgttgaatatggtagtgcagggggaaccataggtacttctgtgggtgctttcgttgcatgtctatatatggtatatgtttatggaaagaagaattttgaagaagattctgtgtatgctcaacaaaatgttaaaagagtaagaactaagcatatcataagaaagttaattaaatacggtttaccaataacattaagctcagggcttcagaattttggtagcttagtagatatggtgaacgtaaatagtagattagcatctgcgggatttaatttacagcaatctcatgtgctttatggagttcttggaagatacaagactttactatctgtcccattgataatagttactgcccttgggacaaccgtattacctgctgtttcagcagctatggcattaaaagataagaaggaaataagaagaaaaactacttttgctttcagaataacattaataataacaataccagcagctgtaggtctttcttgcttagggcaagaggtttttgaattgctttatggaactgatcaagggtttgaattgatggtgatgggatcagtagttttagttctcatggctgttgtgcaaatacaaacaataatacttcaaagtatgaataagctttattatgtgcttggaacatttagtatagggatagtagctaaaataatagcaaattacatattagtagggataccagaaattaatattttaggagtagtagcaggaaactttttatggtttgcaataccaatgatcttaaataaaagagcattaaaaaaggcacttagagttaagattcctctttttagaagtgcggttaaacctctttttgcttctgcaataatgtcaggtataatatttattctcaagacaccaacatcagttatattaacattagctaatggaaatactttcttgaaagcaatcacaacgattttaattatttctatagctggttttgtttatttatattcaatgatgttaataggtggaataaaaaagaatgatattgacagtatatcacctagaatatttaactatttacctagatttttgagaaaaaaacttcaaaagtaaagaatgggatttaactataaacatttagtcagtgtatttataatatctactacggtcagatggcttcatagaattatataatgtacactagcaaaaattatagttaaatcccaatttggtttaagaaagaacaaaatcttgttaagataaactatataaataactcagatatatattaatattcattttctccaaatgtaccaaggtacgtaaaaattaagaaaacaagacccattataataaagttatttatcactaaagaattcgtgaacatatgttttgaaaatatgtttataattaagaaagttaaaaatccaagcaatatatatattactatattaaacttgtttaaattaagttcaatatgtttgttaacctcgtacatattgaggataaatccaattgtacacgctacaagcatagttaaactataaccaaatatattaattgaatgaatagcagtaaatatgtataaacatatcaattcaattacagcttctattagcgagtttcttaaaattattccttgcctattaagtccatttagtattccaaacatagttactgcaggaaagaatattggtgcagtaagtgaagcaaatctaatatacagacctaagtcatttctcccataaaacatctcaccaaggctatgaggaataacattacaaattattgtggttgctatgccaagcaagaaagcaactttaagaacctttcttattcgaacagaggcttcatattgttttcctagaactagactttgagaaagatctggaattaataatgtattaattgttgagactacaattaacggtattgttattatgctaagagccatcccagtatacttacctatcatacttaaagcttcagtataagtgaagccagctactagtaaacgccgaggaacaattagtgttgaaagagtccctaggatattagttaaaaaaccatttgcacaaagtggaattgcgataattaccacatcaaagagaagttgaaatctgctttcagtcttttcataagaaataggcatttttctaatagagtatttgtagtaaatatagaggaaaaataagctttgaaattcaccaatgcataatgcaactgtagctaaggttaccataccttctaaagtattagctttagtaaaaaatataagcatacttacagttaaaattctcatggctttttcaaaaatatcaattatagctggcactgtaatcttagaagttccgtaaaagtaacctttaagtatatttgaaattgctatacataccatagctggacagataacttttattgcatttatagtacgagcatcatttacaccatattttccaattagtggagcacatacaaacactaatatacctaccaagagcgcccaagatatgttaaataatgaaacaactctaattgttttttctatatttttatgttctcctttttgtgcatagacagcagttattttagatatagaagcaactatccctgcagtcataagacatataaataaattgtaaataggcataactaaattatagagtcccattccttcagcacctaggactttagaaagatagatggaaaatataaaaccaagtataccagtagtcacattagaggacaccagtaaaaaagaattttttaaaaaattatctttgcccaaagttcattcactcctttaaattactttaaataatattcaaaatgataactaaatatgaatttgaaaattttagatataaaggtagtatgatataaaataaaacaaatatttacaaaaaagtactaaaaagatataattatctgtggctgagttataaaaaacaattgtactaaatgggggaaacataatgaacaaaatttcagataacgatatgataaattttttctataatgcattgccatctatagaagtcctttttgatgaagatgtatctatggcattaactgatactaagcaatatttatatacaaagtacagccctaaattggaattaaacaccaataagggagatataattccagaaggaggagctataattgaagtgttgagaactgggactaatatgataaaagttgtgccagagcatgtatatggtactgcttttaaatcatttgcaattccaattaaagaagagggtaaagttgtaggtgtttttgtcgtaggaaaaagtttagaaagaaaaaatgctgtgatgagtataactaaaaatttatcagaaactttatcgcaaatatcaataggtataaacgaagttgcaaaagatgtacaagagttagcgacaatgaatgaagaattattattggaaactaaagaaactaatgaaaagaccaaagatacagataatatagtaacatttattcaaggaatttcatcacagacaaatttattagggttaaatgctgcgattgaagcggctagagctggtgatgcaggtagagggtttaatgttgttgcacaagaaattagaaaactatctaattcttcaaatgagtcaataaaacagatagattcagttataaaacatatatcaacatcaataaatagcataaatgatggtttgattaaatctaatgatgtctcacaaagccaatcagctgcattagaagaaatagcagcatctatagcagagttaaactcaacagctaagaaattaggagaattagctgaaaatctttaatttatggaatatttattaacatatataaatgtgtttacatagttaaaaagaatataaaaattagtaggagaaataatccatatattttatgtgaattattgctcctattttaatatgtaaaataaataagatttttaaagagaggtcttattttattaaatttacaatataaatttaatatggatattatgatttgtacataagaagtatttttagaatttaattatagaggtaaaggagggaagtgtagtgaaaagatttctaaagtttttgattatatcaattataatagttgtactagcttttgctgtatttaaattatctaatgaatataggatgaacacattaaaaaataatgttagctggagtgttgtttataaaaattgtaaagattctgtagcttttgagaaagatgaaaaccaaaatacctatatagcttacaataattatattaaagttattaaaatagatggtagggaagaaactttattggaggataaatccttagaaatagaaaacttactttattataataataaattatattttatttctaaaacagatttatatgaatatgatttagcatccaaaagtctaaaaagcattttagggaatatacctagtgaagggaaatatttagataggaatttaattataaaggattcaaagttacttttagcgataggaagtgctacgaattcaggaatagcatccaatgatggcgagtatccgcaaaacaaaataccttacgataaaagctctatagatgtaacattaaatggattcaattatggtgaaaagaaaacaggagctttcatgccatatggaaattccagtgaaggagggcaaagaataaaagctcagagtatagcaaactcttgtataattgaagtgaatctaaataacgataagacatcattatatgcttcaggaataaggaatgtaaagggatgggatctagatagtgaaggaaacctaattggaattgttggtggaatggagaagataggggataggcctattaatagagattttgattatttgtataaactagataaaggaaaatggtatggttggcctgattttagtggtggagatcctataagttcaccaaggtttaaaggggaaaaattagtatcacctcttattgctaatcctcctaataaaatagttcaagcacctatatatcaatattcagaagttagtgctataagatatttagccatagataaagatggaaaaatattagataagaatgcaaatgtatattttaatagtaaagagaatcttatagctggaataaattcagaaagtgttgtatatgacttattaaagttaaaagataagagcaaaatacatggaattaaatattcagatggagatatttatatattagatagtggaatgggctgtatatataaattacaatctaatgattttggattaaaatttaatcttccgaaaccaatttggatatttatatttgtatttttatttatattaacctgcttaataatatttaaattttattctaagcgcggatataaaaaataataagaaagaaaatcgaactgtcttaagtgatattttattaacttaagacagttttattatttaagtaatctaataaacaaaaataatttgtattcaaatttatggaataaatgctaaaatataataaaaggtattagtgataatggaggagatgttatgggaaaaacattggtaattaatctagagaatattatatttcaaggtgatatattagatgtaggagaaaaaaatcttggtataatatataatatatcaaaggaagcaaaggatgagatatcattagactatgtatctagcgatagtaaagtagagctaaaagatagaaaatatgatgcatgtacatttttctttgagctaaataaaatatggactagtctagaaaaagaaagattaataagagaaataagttcatatataaaagaatctggtgaaatatttatttgggatattaataaagaaaggggaaaaatatttaataataagataaaagtaatattacaaaatgaaaaggttaaggagtttacgtttaaaaatttaaatgtacttttaagttctaatattgaagaaataaaaaaaattcttgaaaaatattttgaaatagaagaaactaaagcatgggaagatgttttcttcataaaaggaaagaaactgaagactaaagctgaagtagaggagaaaattaattatgaaggtattaatcacagcagttgactctaaattcattcatagcaatttagcagttagatatttaaaaagttttacaagagatatggattatgaaagcaaaataaaagaattcactataaacgatagggaaggtagaatacttgaagaaataattaaagaaaaaccagatattgtagcattttcaacatatatttggaatgttgaacttatttcaagagtggctaatttgataaagagagtggattccaatatagaaatcttatatggtggaccagaagtttcatttgactcaagaagtttcttgaaaaataatgtaggagaatatgttattgaaggtgaaggagaaaaaacttatagagattttattctatataaattaggtaaaattaaactggaagatgtcagagggcttcattataaaattaatgatgtagtttattccaatgaaaaacgtccacttatgtcaatggatgaaatagtttttccatatgaagaaaatgaagatttgactaataaaattgtatattatgaggcttcaagaggatgcccttttaactgtaaatactgtctttcatctacaagtcatggagttagatttttagatattgatagagtgttaaaggatttaatgtattttataaataaggaagttagattagttaaatttgttgaccgtacatttaactgcaattctaaatttgctatggcaatatgggatttcttaataaatcaagatacgaatactcaatttcattttgagatatcagcagatatattaaagccacaggaaatagaacttttatcaaaggccccaaaaggaaggtttagatttgaagttggagttcaaaccactaatgatgaggttttaagaaatataaatagatttgttaattttagtgatataaaagaaaaggttctagaaattgaagcattaagaaatatagatcagcatttagatctaatagcagggctcccaggagaagattatgaatctttcaaaaagtcttttaatgatatgtatgaaataaaaccagaggaaatacaacttggttttttaaagttattaaagggatcttctatgagagaagatgcagacaaatatggaatggaatactcaccatatccgccatatgagatattaaaaacggataagatctcatacgaagagttattaaaactaaaaaaggtagaagagatggtagataaatattataattctcaaaagtttaatcatataattagatattttgagagaaaatttgagttaccatttgatttttactatagtctaggaatgttctttgaagataaaggttattttagcaaaaacataggaaatgctgaatactataaagtatttttagattatagtgaaagtgtattacaagaaagtaacaaatatttaaaagagattattagatttaattacttaatatttaataagaaacgtggtcttccagaatttttgagaagtgacatggagaaagaagaagaaaagagtataaaagaaaaacttaaagaacaatattcatttaaagaatatcatttggaaaagtttaaaattaacatagagaaatatattgaaactggagaaatattagaagaggatatttattatttatttaatgataaggctgaatatattagatgtatttaagtaatataagaaaatattgagacttatttatatttatgtaggttaaataaaaagattatttgaatatagcaaagagtagcatgcataggaataatatgagtgttactcttttatatgattagataataaacttttgtaaaaagcttgataattagtattattaagctttaatttttgcatttacgaataaaatatatttttatttttagaaaagaggagtatagttaaatagacaacatgttaactaaaattatattggggagattaaaaaagtgaacgaatattatatacagcaaattttttcaacaattttctatttatcaaacaagattcaagtacaaggggataagatggatgaaagaataactgtacgtcaatggatggtgcttttgacaatttcacatttaccagaagacaatgcatcttatagcaaaatagcagataagatgggatgtacaaaacagaacgtaaagcacattattgatagcttacaaaaaaagaactatgtgcttttggagaaaaatgaaaaagataaacgtgctataaatataaaaataactaaagaatgtagagaaattatgggagagtattacgaaaaaggaaataaatttttaaaagatatgtttaatgaccttgaggaaaaggaactagaaaatttgtgggacttgttgaaaaaaatagcaaactatgatggcagcaattggactggctatgaagaaagagttaatatttgggggagaggttaatggagaataattgtacgataagtattatgcctgaaacatcaaaagttgatgaacctgtaacaataaaaataagtggacttttaaaaaatgaaagagtattaattcgtgccttaagcaatgattattattgcataaatacttctatatttgatgtagggaataaagcagagtgggaatcttatgcggtttttgtggcggatgaaagtggaactatagatttagaaaatgctaagcctgttgagggaacatataaagaggcagataaaatggggcttttctattctatgactgtaaaagaaaactataaaactaaaattcctataagattaagtgatattggagagaacagagattatacaatgacctttcaggtagagcgtaatggaagagttattgcgtcaaaaacacataaaagaatttattgtgatgaatttatttcaagtgtagatgtagtagaagataaacttttaggaagatattttacttcaaaggaaaatatacccaagccagcgattattgttttgagtggaagcgatggtagacttgaaaaggcacaggcaattgctgaaatatttgcaatgcacggatattcagcactagctgtatgttattttggtcttgaaggaactaataaaagtttaagctgtgtggagcttgaatgtgttgaaaatgcgatagattggttaaaaaaacaatctacagtggccaaaaataagattggaatttatggtagatctaaaggtggagaaatggttttacttgccgcatctatttttaaagacataagttgcgtcattgctaatacgccaagctgttatgtttatgagggtttaaaagctaataagtttccttctaaacattcatcgtggatgtacaaaaggagagaaataccatatataaaatttagtttctctattttgattcagacacttgtaaaaatgatgataggaaataaagaagctatggcttggatgtacaggaagctcattgaggatggaaatgtttatgaagctatgattccagtagaaaaaataaacggaccaattcttatggcttcatctttaaaagataaaatttggccttctaaaactcactgtgaaataatcgtggaattgcttagaaaagctcattttaaacatgaatataaacatatcacatacgaaaaatctggacatatgctaactgtaccgtatcaatctatatatccttcaaataaatatccagacgatatagatggttttgcaaaggcaaatataaattgttggaatgaaactataaactttataaacaaatggttaagacaaaagatctaataacgagaatgatttaacctagaaaatgtatctaaattattgaaatgggtccaacccctgatgtttcctataaatatttatatattttaatagttaaatattaaagtatataaatatttaactatatatgtttgaaaatatatatctttgataatatttaaatataaacatatgttaatatttaaatttaaatctattgtcattttaaaaaaatccgattttgaattgattcctccggtgtctaggaattcgagtggtataagagattatactgatgaagattgtaattgggttcattttatgaagtgtatgcgtggaccagggctttctatcgaagtgttaatagaatataatcaatgttttaaaaaggaagctctacaattgaagcagattatgtacggtggtttacataatatcatgttagttgcattagttttattagctattgcgttagtttttaatattggaatacaactaaaggtgaaaaagaagtagtattttaaaaggaaaaaaattatgttcttagtttttaattataccgtaataattttgtaattgatataagatatctttaatagtataatcaaataggaagtaaaccaagatggaatacttggatataatttactactgtatatttaactaaggagtaggaaagatggattatgtattagcaatggtaatttcacttataactgcattaattaccatgccatttcttatgaaactagctaacaaattacatttcacggataagcccagcaaaagaaaacaacataaagtgccaacaccactatgtggaggtttagcattgtattttggtttttttgtttcgtattttatattcccaagggacgatatgaagcagcaattaactgtttttgttgcagcaacaatgataataataattggtttaatagatgactggtataagactaaaggaaaagaatttgctatatttccaagattagttattcagctattatctgcaatcttagtgtttaaggcaggtgttttttttcaaggatttacaaatccttttacaggcagttatgtagagttgaacactacaatacaatttatccttacaataacttggatatttggagttacaactgtaattaactggtctgatggtatggatggattggcaggagggttatccctcatatctgcaataacatttttcttagcagcaattatattagaacaaagtgattctgcattagtatctataatgttagttggaacaattttgggatttttgtattataatagattcccggcaaaagtttttatgggagattctggagctaattttttaggatttattttaagtataacagcattggagggggcatttaaacaggcaactgttttaagtctatttataccaatacttgctttagcagtacctatatttgataatttatttgtcattattaaaagattttcggaagggaaaccagtgtatcaagcagatagaagccagatacattttagattagagaaaagaggtcttactactgtacaagtcgtaaattacataatgttaataagtttatcttttagtgcgatttctataatattgctgttaattaaaagataaagttagtatatttagacattttatattttaagtgaagtatttaaagttaaagatgaaacatttacaaacaagatattataatatataattaaaaaatataggaacttatcaagagtggtggagggactggcccgaagaaacccagcaaccggtaaattttatagaattacttggtgctaaatcctgcagcgtaaaagctggtagataaggtattgaaaagcatttaagcctaaaggaatacctttaggctttttttgttaaaataaattctcgcaaagaaagattatataaataattgtgaagagtaacaatgaaaatttataggaaatgttagtgctttgagatttgcaataaggtggtgattaatatatgggagatttgaaactacagataaacaagaatgaagtacttaggtatcttggatacaaaggacaggatatagatgaaaatattgtaaatcttattgaggaatgtagagaagaaataaagaagataattaccccaagatttatgtatgaatataaagatataatacagattgatgaggctatagaggttgttaatacaaaactaattttatatggaaaagatataaaagagcatcttaaagattcaaaacagtgcgtattaatggcagtaactttgggaaatgatgtggaaagaaaaacgagattatatgaaaaaataaatttaacaaaggcacttatattagatgcttgtgctacaacggcagtagaggaagtatgtgattatgtagaaaggattgttaaggaaaaagctatattgaataataaggatataacttttaggtatagtccaggttatggagatttgccgttagatgttcaaagtagctttttaagggcattagatgcccagaaaaaaattggactaactgtatcagaaaataatttactatttcctaggaaatctgttacagcaataatagggataataaatagcggaagtgaaaagaaaataaagagctgcaaaaaatgtactaactacaaaaattgcagttttagaagagagggagaaatctgtggggattagggaatatataagaaataacatattaatatttgatggagctatgggaacaatgcttcaaaagaaagggctgaaattaggagaaaatcctgaaatcttaaatctaaaagagccatatataatagaagaaatccatagagaatatatatctagcggtgctaatgtaataactactaatacttttggtgctaatgagcttaaactaaaactttgtaatttagtggttgaagaagcaatagatgcggcagttaatatcgccaaaaaagctaaaggaaatagtgaaacatatatagcactggatgtaggtcctataggggaacttttagagcctatgggaactctaagttttgacagagcgtatgaaatttttaaacgacaaataattcaaggggttaaatctggtgttgatataattttaattgaaacaatgacagatttatacgagcttaaggccgcagtgcttgcagcaaaggaaaattcaagtttgccaatattttgtacaatgacatttgaagaaaatttgagaacattcaccggatgtactccagaagccatggtacttgtattagaaggattaggagtagatgcacttggcgttaattgctctttggggccaaagcagctaaaaccaattgttgaagaaatatgcagcttatcacatattccagtaatggttcagcctaatgcaggacttccaacactatcaataggtaatgaaacaaaatatgatgttactaaagaagaatttgcagatacattatgtggattaattgacctaggggtaagagtgataggtggatgttgtggaacaagtccagaatatatcgaggaattgtataaaataacgagaaataagaaacttgtgtccatggaaaaagaatattattccgcagtttgtacaccgtcaaaagtagtaaggatagatggtgttagaatcataggtgaacgaattaaccctacaggcaaaaagatatttaaggaagctttaaaaaatggagatttagattatatattaaatcaagcagtttctcaaatagaagttggagctcacattctagatgttaatgtaggattacctgaaattgatgaggcagatatgatgcataaagtaattagagagattcaaggcatcatggatacaccacttcaaatagattcttctgatcataaagcaatagagacagggctcagatattataatggaaaacctatattgaattctgtaaatggagaagatgaagttttagatagaatacttcctatagtaaaaaaatacggcgcaagtgtagtaggtttaacattagatgaaagaggtattccagcaaaagcagaagaaagatttgagattgcagaaaaaataataagtaaagcagcggaatacggaataagaaaagaagatgtatttatagattgtttagttttaactgtgtcagctcagcagaaagaagttcaagaaactttaaaagctgtaagaatggttaaagagaaattaggagttaaaacagtacttggagtttcaaatatatcgtttggccttcctaatagagaattaattaatgagactttcttggctctagctcttgccaatgggctagatttaccaataattaatcctaatgtgaatggaatgactagagttattgattcttacaatgttttatataattatgataaaggcgctgaaagttatattaataattatgcaaatgtagaattatcaagagaagtcactattaaaggtaatggagcagcaaagattaattcaaatataaatacagttcatgatttaaagtatattgtcgttaaaggactaaaagaagaggcgaagcaagccactgttgaattattaaaagaaaagaaggagcttgaaatagttaatgagcatttaattccagcattagatatggttggagaaaaatatgaaaaaggggaactttttttaccgcagctaattcaagcagctgaaacggtaaaaaattcatttaccattttgaaggaagaaatatctagaactaattctcaaactatatcaaagggtaagataattgtagctacagtaaaaggagatattcatgatataggtaaaaatatagtaaaagttatcttagaaaactatggctatgaaatgatagatttagggaaggatgtacctataaagactgttgtagaggaagcaaaaaaacataatgcatctttaattggattaagtgcgcttatgacaacgacacttaaaagcatggaggaaacgataaaagcgctaagggaagatgggtacaatggaaaaatatttgttggtggagcagtacttacaaaagatacagcagaaagaataggtgcagacttctatgccaaagatgcaaaggaatcagtagaaattgcaagaagagtactttcatagtaaataataaattaagaaactaatatttaaagggttgtcctatgcattaaaaatgcataggacaaccttttaaattacaagaatttatactaaagctaaattataaaatattataattctattatatctaaatcatcaggcatgtatatctttccgctgaactcctctttaccttcatttatgtacaattcttttctattctttagatttttatcttctgtatgatataaaataacattcttaacatttaaatcctgtgcatttttgcaagcgtcttttgcggtagcatggtgtttttcatatggtttgaatatttctttttgagagtaaaggcaaaatgcttcatggaataaataatctacattagcacaatatttcttcacagtttctctataaggttcgtcacctaaaaatgttagagacttaccgttatttaatgttgttgtgaatccatgttggagatcttttgtgctttttatatcgaagaaagtagtttttctatttaatatagttgttgtatagttatcttcaatttcattaaataatattctatcatcaaataattttaaaaattttttttgaagcacaaatgaagaaattgattttatagcatctattgaagttttgtggcaatagatatttaaatttccagagtatttatcatttagtatgctttgtgctacagcgcggataacccaaatacttcctagtatatgatcattatgattatgagatataaacatattatgtattttattaattggtatatttaacttttctagatttgatagtattgtattgccaccacctgcatcaataaggaagtgttcatcttcattagagaaagtaaaacaggtattatagcattttgtaatcattgctgaaccagtgccgagaacatatattttttccatagtaaatctccttgtataaatataaaatttttaaagataatatgagtaaagaccactaaatattaaatttaacataattacaattataagagttaaatgaaataaattcaatattatgatagtgttacataagttagcctaagtttgatatataaatacaaatatattttgtcaaatgcatttacttataattagacatgctatatactagtgtatatacatgtgatgcaagaggaggagaaaatataatgaataataaaataaaacaaatggtgtatgccggattacttacagcattagcaataataattcctattcagtttggatttttaagaatagttattccaccatactttactgcaacattagcggctcatgtacctatgatgttatcaatgttgatatcgccttttgtggcagctgtagttggaataggttctacaattgggtttttaatagctggaacaccagcaccagtagtggcaagggcagcaactcatatagttgtaggatatgttggagcaatgataattatgaaaaataaaagttatgttaaggcaatagcaataacagctccaatccatggaatattagaggctttagttacaataccatttataggattctcagttgccgtttatcctgcattgatcattacagttgttggtgcaatattgcatcattcagcagatagcataatagcatatgcaatagttaaagctatggcaaaagcaagaaagaaaaacatttataatgtttttggagaattcaagactcaaagagctttacagagataaggataattagtacttataatttataaaatataatagagttgttcatatttaaagctgagtgcattatatttagatgcattcagctttgttttttaaaattatatggaaagttatagaaaataataaaaaagatatagacaaaaatactaaatatcatataataaggatagaataaatttaaagttgtaaaattgagaagtatgttaaatgttatttgactaagaatcttaagaaaaacaatttcaaattagaatacaatgaggtgaacattttggaagaaaaagaaataatgtcgtttaaagatgaaaatggaaataaagttgattttgaagctattgcaaagatatatttagaggaacaaggatatttgttactatcaccagtagatgaaaagtgtgatgatatgtttgcatttagaatagatattaatgaagaaggcaatgaagaattaaaccttgtggaagatgataaggaatttgaggaaataaagaaagaatataagaaattattgtattaaataggagtgaaatttaatgaagagttcagaaataattgattttttggaagacaatgatttagcagaggttgaagaaataaaacacaaaagcaattatgtgataataaaattttattatgactttgacaaagaagaattaagcgctgcaaaagcatactcaactgaagaaagtgattttgaacccgaaagtgatgaatggtataacgaatattacattccttacttaagagatattgccgtagataatgtagaatcaataatggaagaaatatcagatgagtttgaactagaatctaaatataaagaattcggaatggaaaatgggaatagtggatatttcaagtttatagcagcattttctgaagagttaacagatatagaaatggaagatattttaaacgattactatgagtaaaactggtattaaaatactattgaaaatatatttccttatgttataattaaatcatagatttcctgagatgtacgtaaagcttatgatattcaacctacatgacattatcgggatttacaacatattcataaatgtcaggcttcattaaaagcacagtattgtgtcagtagaagacaggaatgaattgagtttaacccacctgcgaggcgcaggacttgaatatataggtgaacggcatgttgggagctatgattgaattcaacacctctattagaggtgtttttttatgtacaataaaatataaactaaaaagaaaataccaaacctatatctagtttggtattcagttatattaacataaaactaaagttataattaaatattctagttcttataaagtagctatttttatagtttatttattgctatattttaagcagctatgttttttacagatttagagttatgttgcttataatatattgaaatcaattctttttgatataagacaatgtacttgtccaaattttgagataaatcaactataaatgttttacttggtgaaaaaaacaataataataagttaagtaggtttttcctaagtacaatattacattttagtttaaaaattacccaagttttcatactaacacctctttttatcagacttggtttttgttatatgattattataaacaagaaaagaaaatttgtaaaaatatttcataatacaattaatgacaataatttgcagaaatgtttaataaaacggttaataatttgtttttctagtagattcatacctgaatagaacataattgtatatattttacaggcgaagtgttcgacaaacgattacgaagaagaataaatggtgtcgaaaaaattcgggttgattatattattttaaatggtaaaattattgatatacggatagaaaggatgaaaatatgatggacattgaaaatactaaaatagaagaagttatagagaaaatcaattcattatataagactagtcaagaaagagaattaagtaatgaagagaaggatttgcaaagtagattaagaaaaagatatatagataatgttaagaaaaattttagagcgcaattagaaggtatagaacttaacaataagaaaaagggatgatgagaattgggtgttttagttaaaaagttaattgatgatttaaacttagaagtgcttgtagaaggaaaagaagatgttgaaatttcagtaaatgatataaatagaccgggactacagcttgcaggcttttataattattttgctccagagagaatccaggttataggtaaagcagaatggagcttcttagattatatgcaaattgaattaaggaaaaaaagagttaaaaaatattttagctttgacataaattgcttaatcataactagaggattggagccacatccagagtttataaaggaagcgaaaaagcacaatatatggtttgttagaagtaatttagttactacacaatttataagcaaaactacaatatatctagctgataagcttgcaccagaaacaagattgcatggagttttggtagatgtatctggtataggaatattgattactggagagagtggaataggaaagagtgaaactgcattagagttgataaaaaggggacatagacttgtcacagatgatgcagttgatataaaggacatagatggacagctaataggaagatcacctaaaataaccgttggaatgttagaggtcagaggccttggcataattgatgttacaacactatatggattaagttcagtagttcaagagaaagagataaggctagttatgcattttgaacattggaaagatgacaatgattatgataggctaggaatagataatgaatatatgaatatactaggaattaacgtgaagaaattaacggttcctattagaccaggtagaaatatcgcggttattatagaagcagcagcagtaaattatagacacgcattaatgtctaaaattacaccagttgatgtaatagaaaatagaatgaatgagcttaatgattaatatagtatgtaactatttttacataactcaagtctaagtaaatgatttgaaatgcttagaatatgagatatatatttatcatcaaaaggaggattgactatggaaaatgaaaaaaaagatttaagcaaaaatgcatggaataaatatgatgagaaagaagttcaaagcatattcgagttttgtgaaggatataagaattttatgtctaaatgtaaaactgaaagagaatgtgttaaggaagtacttagattagctaaagctgaaggctatgaagatatagaggaaattataaaaaataataaacaattaaaaccaggcgacaaggtttttgcaaataacaaaggaaaagctgttgcgttgtttattgtaggaagtgaatctatagaaaaggggctaaagatattaggagctcacattgattcaccaagattagatttaaagcaaaatccactttatgaagatagtgagttagcattacttgatacgcattattacggtggaattaaaaaataccaatgggttacattgccactagcattacacggagtagtagcaaagaaagatggtactgtaatagatatttgcataggtgaagatgataatgatcctgttgttggagtatctgatcttttaattcacttagcaggagatcaaatgggcaaaaaagctgacaaagtagtagaaggtgaagatcttaatgtattagttggaagtatgcctttaaagggaagcaaaaaagatgctgttaagggaaatatattaaagttattaaaagaaaaatatgattttgaagaagaagactttttatctgctgaaattgagattgtaccagctggaaaggctagagattatggtttagatagaagtatggttatggcttatgggcatgatgatagagtatgttcatatacttcactaatggctatgtttgaaataaaagagcctgataaaacttgctgctgtctattggttgacaaagaagaagtaggtagtatcggagcaactggaatgcactcaagattttttgaaaatatagttgcagaaatcattgatagaattgagggatattctgatcttaaattaagaagatgtcttactaattcaaagatgctatcatccgatgttagtgcagcttttgaccctaattacccatcagtaatggaaaagaagaattctgcattctttggaaaaggaatggtatttaacaaatatactggagctagaggaaaatcaggttctaatgatgctagtgctgagtatatggcagagcttagaaatataatggaaaagcataatgtttcaattcaaactgcagagcttggaaaagttgatgctggtggcggtggaacaattgcatatatattagctcaatacaatatggaagtaatagattgtggagttgcacttcacaatatgcatgcaccttgggaagttgcaagtaaagttgatatatttgaaacagtgaatggatataaagcttttttaatagaggcttaatctcaataaattaagaaaaaagatattatcaagtctaaggactgataatatctttttttattgacagttaatttaatcacctaatattataatagtggtggatctaaagcggatagaaatttcgatagatagttactaggaaattgcatacagccaatgtccccatgacgatcatctgattctaaatcaccgtgaaaatcggaaccacaagaaactaacaaattgtgttcatctgctaaagagaggaatctggaagtttcatcttgtgtattttgaaaataaattgattcaattccatcaaaattcattagcaataattcatcaatattagaatcatttattaatttagggtgagctaaaaatacaagagcattatatctttttagtaatttcaatccgtcgctagtagaaagttttaaggttgggacatatgctttacaacctttcccaataaatttattgaaaacttcctctaggttataaggatatccgcaattgactatttctctagcaatatgaggccttgcaatagtatcattagcttcttttagaattttttcaaaactaacttctatgttaaattcatctttaagcttatcaaccataagtttagctctcattatcctatgatccttaatattagttagttctctaataagatcatcatttttaaagttattatctctaaagaatcccaaaagatgtacactttcattattgtgttgagttgataattcaattccaggaattagcgtgatatcatattttaagctttcttcaatagctttatctaaaccacttaaggtatcgtgatcagttatagctaagtacttaacattgttatcatgggcccttttaaccacttccttaggggataatgttccatctgaagaagatgtatgaacgtgaaagtccactttaagcatataatttaacctccaatttaatttaaggtttatagtaataaaattatctaatttattgtagattaacttggaataatataaaaatatgttatgcaaattttaataatataatcatatcataagatacttatacaagtatactaaaataaaacttagtggcggatatttataacataagttaatattcacattttctaacttatgtgtatataaattaaaacaattgtgccatgatctttttataaaaatatctattttgataaaggtttattagctatatgattacaaaaatcgaatggattgtatcttagcggtaaatctttaattgatataatatcttccttataattcccatcccaaggtgaaactgatatagttgaatcattaaaaatcctaaatagatactggctattatcttcaaaaagtatttttattctgaaaggttcttttgcatcaactgattcgtcagaataattaacagttgttagagctgaaacaaaatcttcaattattgaattttcttcacttggaacttctatttccttatatagattagtatcaaatacataaagcgtgaagttttgattatttaaaattttagctttaatttcatcaatataataatgattacttggttttactgaaaagtttatgtatttaggactttgaagagcacagctgctcaaggtgaaacagagaaataaaattgtgaaagcaaaagttaattttttcaaaagtatacctcctagaaatacgttatatactattaaatttattcttttagttattttttagaacttttcagttagccaataagtgataattacgaagattctataatatgaataaaaagtagtgataatttgggagattagtttatgtatataataggaacggtaggccctaatgtaaaagatagagcagtacttaaagggataatagagagtggagtaaatgctttacgatttaactttatacacggaagcgcagaagaatttttagaatttttaaaaatggctaaagatataaagagtgatatccaagtaatgctagatctttcaggaactaaggtaagagtatctggtaaattccaatatattttcaaagtttataatggagaagtaatttatttttgtggagaagacaaatatagtgaagtagtaaaaaatagtaaaaataaaattaaagttatcccattaaatataaaaaacaaaattttgaatgaaaaagattataaacaaataggaataaaggacaatacgatgactttcgatatcatagataaagttgatggattaataaaggcaactacaattcggggaggagttattagaaaatggaagggttgcaatataaagaatcttgaaagaaaagagttgccactaaatgaaaatgataaggacgcaatagtttggggagttaacaataaagtagatataatatgccaatcgttcgttgaggaaaagaaagatattgatgatgttaaattatttctaaataacagaaaatcaaatcaatttaagcctaaaatttgggctaaaatagaaacattaaatggagttaataatataaaaagcattttaggtgaagcagatggaattgttataggcagaggtgatttgattccagaaacatctatagaagatactcctatttatgaagaaagaataataaaagaagttctaggagataaagataaggagataattatagctacgcatatccttaatagcatgaaaaatggaaaaatgccatcgatttcagaggtagagagcatatataatttcataaaaatcggagctactggatttcttttggcaggggaaacgtcaataggaaaagcacctataagaacagtagaatttctaaataatttgattataaaatatagaaatatatgagcagtaataaaaaagtccaagcgattatgaaatagcggaaatcaattaatcatgaaagtaattgaaatgatattagttagactgagtatattaaaaagtatatataaatatgtattaagagtataagaaataaatatgatttatttcttatactcttaatttgtctatatgttattatgtattcgcttcaaatagaaacttatgataatagtcaatgcgtaatcataaactaaaagtacaatttgcccagcaatccatatcatatataaaggataatcaatgttaaaatcgactaaaagattagtaaaaataaaataaattactagaagtgatgcattaaaagcgattaatttaaaaaataattccagtggaatatttctaagtttttctgaaaaatattttactattccataaatcccaaagaatgatatataatagacggcaatattggttggaatcaaaaataaactaagaatacttgaggctacataaactaatatagtattttttattgaagttcttattattgagataggaattaagcaagaagctattgtcaatattgttaaagtgcttactggaagtatagaagcagcataaagtacaattaatgttaatgctatagttattccgttttcagctatatattttgccttcataagatattcacctcactaaataaatgcaacttatatatatgttctaaaaagtttaattcatagaagtttactttaaagtataagttaatgtagtggcagtcagccagttttttaaagaatgaattataatatttagaacatatatattataaaataaaagagttaatcatatttatattagcagcagccaattaaatctccgccagcacattcgcataaggaatcaagacaccaaagatttatacaacaattacacatgtcagcattactagtatttgtagttctatagtaaggattagagtaattattacctctttgccttaatgagttcaagccctgcctatattcaaaattatttggatccatattaacagctgtagtcatatgatcaagtgctgaatcaaaccaccctttgttaagcattattgcaccatataaataatgccattcagcagatttgttatttatagaatttaaacgactttcagctgctgcataatttccagattgaataagtcttcttatttcttgaaaatcatatgagttacttgatgaattgttataactagatgtactattggaattataactgttacttccaggattttttgttaatgcctcataagcctcattaatttcgatcattttctcttgtgctaaattttttaatggattatcaccatattggtcaggatggtattgcttaataagttttctataagcactttttatttcatcttggcttgcacctggctttacacctaatatttcatatggattcattataaatctctccttttagtctcatttgtattttctggatttttaactatgttcatatatttatccattaaacctaattcaattatattatataatatatcctcatttctttttaggtttaatttttctaagttttctttacaactatatccacaatttaaaattgtaaattctattttaggctgtatgaattccataaatttatcgtatgttaaagaatttttgttatacaagaaatttattggattaaattttttattttccatatcagatttcaaatcatctaaggcatctattagataaatccattttcctattgaatatcctaatctatataaagtattccttaaatccaatccgtcatcgattaatttataaggatagtcacgtaaaattccgccaactaaatcgctaaaaggatcacatatttcatctatagaattaaatgatttactatcttctaaagtggaaagcttatttaaagattccattatgttgttattaattctaatgattgaactaggaaattttcttttataaggggataaaagaagtgataaaaatttacttttgtaatttttatcatcatgagcatcatctaacagtttataataaaacagggatatattcatagcagaggcataagataacgccttgttattagctattacaatttttttttcagtagggtgaagagaacatctgtgatgagaaatttctagctcttctggatttaatgcatctaatagtaaacctaaaaaagtcatatcataatttaaagacatcctcggtatattaccaaattctttttttatatggcaacataatccacaataatagcatttaaatctagcaaaatcttttactttcatttctgcttttaatggagtaacatatccaaacaataaaaaacactccttataaaattcaatataaatcaattatacagtaaatttaagcatataaacaataaagttcatatatacataataaaattttcagataatattaacatttgtatgactgtatattggacatattatgtatttctgtaaaatatgaatttaattttaatttgtaggaactttttattatagaatccagtataatgttatcgtggccaaaacaggagcgataggagttaagcagtaaataataagtatttcaggaaaatttgaaatatttataaaaaaagtctttacaacggataattattattatataataaaaaatgtaggaaacaagaaaacaaaagataaaattaaatgatataaataaaaaataaataaattaaaattttaggaggaagagattatgaaaaaattcgtttgtacagtgtgtggttatatttatgaaggagaaacagctccagaaaaatgtccagtgtgtggagtaggagcagaaaaatttgttgaacaaagcggagatctagcttttgctgatgagcatgtaatcggagttgctaaaggtgttgataaagaagtaattgatggattacaagcaaactttgttggagaatgtacagaagttggaatgtacttagctatgtcaagacaagctgatagagaaggatatccagaagttgcagaagcttataagagaatagcatttgaagaagcagaacatgctgctaaatttgctgaattacttggtgaagtagtagtagcagatacaaaagctaacttacaagctagagttgatgcagaacatggtgcatgtcaaggtaaaaaagatttagcaacacttgctaagaaattaaacttagatgcaattcatgatacagttcatgaaatgtgtaaagatgaagctagacatggaaaagcattcaaaggattattagatagatattttgcataatattataagatagaataatatacacatatttttaactgaataattaatgataattctgcttaataagcaaagtaaaagagaagataataatttatcttctcttttacttttgtaatctttcttcatacaaagatttgtacatattatatgttttctcatctaagcaaaccattgcaatttcatcaaaggtatctggagagttatttataaatgataaaatctcatctaatgctatattgcaggcttcatctaatggataggaataggcgcctgtgcttatagatggtaaagcaatagttttaatgggatgatcattaatataatcatcaagttcttttagtataaagtctctttgtttatcagtattaaagcgataaagatttttatttagaatctcattacactgctttgaataaaattccgagtaattagcagctatttcaaaaacagaacgataagcatttcttaagtatttttcctctgagccgttatttcggtaaatgggccctacagtatgtattacccaatgcacaccgtggtcactcaagttataagatcttgttaattttgatctaccagtcaaacagccatttaactgtctacactcatctaatagtttttctccgcaagccttgtgaatagcaccgtcaactcctccaccacccagtagagatgcattcgcagcatttacaatagcatcaaatttgatttttgttatatcatcaaaaagtattttaaagttagtcaaattaatcacctcatattagtcatacaaaaattctctcacttaatagtttacacccaattaacataaataaaaatactattttttgaaaaaaatgttaattagctatatgaaaattaaattctagttatacatatgagagaaataataaaataataaagcacacatttaatgtatgctttattattttgtttaattacaataatctttaaattctagaaaaagaactaataaaataaattaattaaataggttgattttctaaattttttcttctattatctaaaggatttaaatttatatgatgtactttcattgtttcgtctgggtccataattaacctgtctaaacgaattctaccttcagaagtatttgcaacaaccatagtttcagtaccctttttgtaaagaacccagttgtaaccgtcttttactactttatttacatcttccattgaaattaaagcagtatccttatgatttccgaatttatctcttaaaattatgcccattgtatcgtgatcgattttagtacaatcattttttaaacttctattatataattctaaattttcttttctgttatctaaagtatttccgtttaagtgttttattggagtctttggattaacatctaaaataacagattgaattgattttttagtggaaactgtttttccattaactttagcagtctctaaagtttgaacaagatgattattgaaatccttatgccattcagcaaaccaaattccagcttctttaacttttttagcgtcgaatgtgtctatcttgcaaactagttcacttccatctttctttaagacagtaatttcagtaagattacctttttcagtatatttattttcttgagttttataatttgtatttatggttaagcacctctttcatgatttaatgtttattaatattatgtgaatgacaatctaatttgaaaaataacacaaaataagttatttttcaaggttttgtatatattatgacacatatataattaatttaaacattacatcattataccagattaaaaatataaaagatatacacctctaaaaaaagcgcgaagcgcaaccaagatcattaaattataagaaagtacgcacctataaaaaaagcgcgaagagcaaccaagatcatttaagttaaaaaaagaacttaccttataaaaaagcacttaccttagaaaaaaagcgcaaccaaaaacatataatcaattaaaaaaatctcattaatatataataagagcaactgataaaaaagtacgcaccttataaaaaagcgcgaagcgcaaccaaaatcatttaaattagaagaaagcacttaccttagaaaaaagagaaaccaaaaacatataatcaattaaaaaaatctcattaatatataataagaacaactgataaaaaagcacacacctataaaaaagcgtgcacatatgaaaagagtgcgaagcacaatttggaacttattaagcgcaaccaaaatcattaaattatatttcattgtgtatacccacaaaatctcaaaaaatattaaatatatggtagacgcagctgagtaaactaaagtaaaatagaatttgatattaagaaagcgcagataatgaggtactaaatatgataataactgagactttaaaaaacattttggaagataagaaatttatacacaaagctatatctattacagtaccaataacattgcaagctctgttaaacacaagcttgaatcttgtggatactgtaatgattggaagtttggggcaaagttcaattgcagcagttggccttgcaaataaagtattctttgtttttacattgctattatttggcattgttagcgggtcttcaattttaactgctcaatattttggcaaaaatgatataaaaaatataagaagagtattaggtatgtctctaattattggtttagctggatcaattatttttgtaataccgagcttaatatgtcctgaaatagttatgagtatttttacaccaaatgaaaatacaataaaaataggtgcatcatatttggctatagctgcaattagttaccctttaactgcagtcacaaacgtttatgtggcgcttttaagaggagtaaaccaagtgaaagctcctgttgtaataacagtgttttctatttgtattaaagtaatgctaaattatacgttaatatttggacattttggtgtaccagctcttggagtgcaaggagaagctattgcaactctaatagctagaacaattgaatgcacatgtattttagctatagtatattatgaaaaaggaccagcagctgcaaaatttaaagaactcatatcttttaataagaagtttacaaaattatatgcttcaactgtatctccagttataattaatgaatttatgtggggattgggagtaacaatgtattctttagtatatgggagaatgggcgatggagctgttgcagcaatcacaataactcaaacagttgaacaaataatgacagttgtatttcaagggataagtgcagcaactgcggttatattgggaaatgaattaggtgccaataaattagatgacgcagaaagtcatgcaaagtattttataatcctgcagtttatttttgctttaataatgtctgcaacatgcttgtttattagaagtccaataattacgttgtttaatgtaactgaaagtgtagcagtagatattagcagatgtttaatagttttttcatgttatttaccatttaagatatttaattgggtaaatattgttggtatacttagaagtggtggcgacactaaagctgcattaatgctagatattactggagtttggttagttggtataccgtttgcctatttaggtggaatgttacttgaacttcagatatatttcgtatatgcaatggttacatttgaagaagtatacaaattcatacttgggtttaggagatataagcaaagaatatggcttaaaaatttagtttagaattggggaggattttaaaatagaagatgaagtctatttttagaattctccctgtctattctaaaaagggaatacttggaaaatagaagcaaattgtataaatatggaattcttaatttttttgtaacctctcagaggattatttgctatataataggagataatgaaaatattaaataaatatagatttcggaggaatatatggataaacaaacaaaccataagccaagaaaaaaaacgcacaaaagaaagaaaagaaaatctaattcgagagtacttttaaagggattattggatatgtttatctttttagctataacaacgccattggtattattctttggaccatatgataatacgagaaaaacattcatatcaacagtcctagcaacaaggcatgcatatttaataaatgatataattccacagtcagcattaaataaacttcttggaatagatgaagagagtgatagtcaagaagtttttcaagatatgaaaaaaataaatgttaaatataaagttggaaatgaaataaatagatacgatatacatactcagagatttgatggatatgtgttagaagtgaaaaatccattaaaaatgaaggttgcaatgactaagtttttaggaaaaatgggtgaaaagacaagtcagatggcggaagataataatgctgttgcagctattaatggtggatcatttattgataaatcaactgatggaactgcttatgcaggcactggatctgaacctggtggatttgtaatatcaggcggaaatgttatttatccgaagtctggtgcagatgagaaaaaagttgaaaatgtaattgcatttacaaaaagtggagaactagtagttggggatcatagtttggctgatttaaaaaagatgaatgtacaggaagctatgtgttttagaagacctaatattgtaattaatgggattagacaagtaaaaaataaaatggaagatgggcttaatcctagaactgcagttggtcagaaacaagatggaactataattctattagttatagatggcagaaagataacgtcaccgggagcaagtttatatgatgttcaagagataatgatggaaagaggtgctgttaatgcaggtgctcttgatggaggatattcttcaactatgtattataaaggaaatgttataaattctcctaatgcttgggatggtgaaagaaccgttgctacagcattttatgtggaacagtaaaaggaggataagtgatgagaaatattaaaagaagattagcatggtgtgcgcttgctctaatattacagcaatgcatatttttatattttgataaagtatatttggcgtctgatcttaatataaaagctgaagaagttaaagatgaggataatgtggctgacaagaaaacagagattaatataaaaaagggagtaagtgaaattaaagtatcttcagatgcaagatatgtatcatatatagaagacagtaagcttaaaacattagatagcaatgatgataaggaaaaagtatgtgatacagatagtggttcagaaattgtattttatagatggcttaatagtgaagataatatgataataattcaaaagataaaggaaaaaggtgcgtactattttgagcctatatcttttgatgctaaaaaaggagaagcaagggatcttgcagacttcgatttaaaaaaggttagaattaagcttgagagtacaaaggatcaaattaataatgttgtattttcaacattaactcatagtttatatatagaagtgaagaagagtagtggaaaatgtgatttgtattacgcaaacgtaatgaatcagttgaagaaggttaaaagtgaaaaagttataggaaatgttgtagtaccaacaactagcactaatgctataatggaggaaaataacaatataactatattaaatacaaaaggaaatgtatcaatacctaatgttaaaagtgcaaaaatattaggagctgatgttaatgataatgtgtattttggcgaagtagcagacaacaaaattaaaaatatatattacagcgtgttatcttatagtcagaggaaatggaatcaattaaaacttgcgaaacctgttgataaaaatgatatactaatcgattattcaggtaaagtttatgttaatagtaaatcagataatagtgtattagaattaacaagtaataaaaacataaaatataaaggggaattggttcaatcatattctaaaggaataatttctagagatggcaatacattaattaaaaataagttggaataaaataatattaataatgaataagttaagaaaaaatagataaactatacattgatgaaaagaagatcttcataaaaaggaagatcttgtttttttacataaaatcaatggaggaatgaaaatgtctaaaataggagtagtgagtgcaatattagagcatccaaaggaagtgcaagatgaatttaatgatgtagtagcatcatttagaggaagcataaaaggaaggatggggataccttttgctgatgagttatcagttatatctatagctcttacaggggaatcagaagaaacaataaatgattttacagagcagcttgaacgtattgatggtgtatcagtgaaaacttcaatagcaaagattgaagtctagcaggataagaaatctttgaaaataaagtctgtatttaaaaatataaagaatgcatacctgacacctttaaaagttgctgggtatgcattaatttttatagtaacataaattttacagttatattttaaaataaatgctataatatataagttcaaatcaatataaataattctttacgaaattatttcagttataatattacttaatggtttaaggcaaacttctatgaagtagatttttagaaaatatataagtttaagggaagaggcggtgttttatgaatccggtagcatttcaaattggaacctatgaaattaggtggtatggtatattaatagctcttggagtaatattagctataatactagcaaactataattgtaaaaagaaaggaatagactttgacataatattagattgcttttttgttgcctttcctactgcaattattggcgcaagagcatattatgtaatatttgaatttgaaaattataaaaacaatttgatagatatttttaacattagaaaaggtggattggctattcatggaggactaattggtgggtttattgctacctacatattctttaaaataaagaaattaaatatgctaaaatacttagatctagcagcaccatcaattattttggcccaagcaattggaagatggggaaattttatgaatggagaggcgcatggtggagaagtttcacattcatttataagccgttttccaagcttcatacagaaaggcatgtatattgaaggaagttactacaatccaacatttttatatgaatcaatttggaacattgtggtttgtttgattttgctattaattctatataaaaagaaaaataatgaggatggtgttgtagtagcaagttatataacgctatattctttaggaagggtatttatagaaggattaagaacagacagcttaatgcttgctaatataagaattgcacaattgataagtattattggaatggtattaggaatagtgattgtactatacattaaaagaaaaaaagctaagaatttaacttaagcctaaaattaagtatattataaaacgaataaattcagagttataatatacttaatggagctattagaaagattatttaaattaaaatttaagaagcaaacatatcaatgcgtatcacttttttagatgcatatctaaagtaattatatccatcaatccagtatttaataagcttaggtttataacttaaaacatgttttaagaagtcctcaaaaacatttgattttactaaaactttaataatctccttaggataaggagtcttttttacaaaaacctttcttggatctataacttgaatttgctcatttttgttaacaaatatatgggcatctcttatatcaagtcttgtaaattttaaagttttaaactcttctataagatttattatttcgatagatagattataagataatccatttttctttatataagaacttagattatcaccttcaacataatctcttaaaatcatgttgttagcaataaataatactttcggaaagaatctgctaccattaactttttcaagcagatcagcttcgtttttagctttctttttattataaaatatttttaaggcatacccttctggagttaaataaacagcaccttccttaccttttcctaaaaattcgcactctttaatatctaaaatgtatctcatcttatcactttaattaattactttagatattatatgctgagactatttagaattctacatttctataaatttgttctagatatcttcataaaatcttcatattaattttgtaatatagattatgaaaattagataaattatatggaggaaataattatgaatatgacacattacatgtcactattagcagataatcaaccttggaatttaattatttttatggcaataccagttatctgtgcggaaacacttacaattactgaatttttcattatttttaacaatgtacaaaagggttggttaagaactttaaataaggttgttggtatatttgatgggatttattttacaggaatattcatttacctattagtaaatgctgtaatccctctaacaaatactggtggatggcatacttgggttgacgtattggcagttggattttatttaagcggcgttatcttccttttgccgattgctctaatggaactagggttaatctttaagaatagaacatcaagggaaaaagcaaaaattcattttatacttattggaggatttctagttgttgcacatattgcaatgatatttggaatggttaatcctgaaataataaataatatgtcaaacatgtcgcaaatgcctggaatgtaaaaagggtgtagtaagttaagataattgcattttttgttataataagataaattgtctttacattagcattttcaaaatgtataattgatttgtattttgtaaatactatataaaatataaatatagaaaagtgcaatgaaaaagaagagtaaatagaattttaattataagagatctagggagggtgtaatcctagaatttaaaactattgaaggaagctttggagtaataaataaaaagcataaggtatatgccttaaagcgtagtatatttatggggttattcccttaaagataattaagagggttaaatcaaacgtatttgaaatttaaaattagtatgtttaaattaatcaatttaggtggtaacgcggaagtcagcctttcgtcctaagtatattttaggatgaaaggcttttttatgttaaaaactaaggaaaaattctaattaaagataaaataataatttaagattaagaaagtttcttaggaggtgccaacatggaattaatcccatttaaacgtccaactgaccattatgaagaagaaataggtggaatcgatgagcagatttgtgaattaataagaaaacgcaaggatatatcaaataataatccaggttatccaccatttgagtatatctcaaaatgggcagaaaagtttaatttatatgagaaccaattaaaatcagtattcagttcactatggaatgaatcatcatataagccagtagttgaaccagatggatttagaaaaaatctacagattttaaagataattgagaaagatgatagccttttctatgtaaccttcattcgtcagtactcaaatgcaagtcttataaattttaatatagataggaatgatataagtgattcttcaaattgcaaatcaaagcatagcagctttgaactgtttataggagaagaatataattgtaggatgaaaagtggatgcgggtcaggagaacattattgttataattttgtagtatcaccagcactgcctgatgatgtttctggaattgatttaacctttatagaatatgagattccattaatggggaagaaaaaagttgatgagattataatacatttatgataaagaatgttaataagtttaattaagatacattacaaacataatgtatcttataaataaattgccatagcaaggggctaataataccttgtaaggaagaatgataaggagagatacaaataatgagttttgaaaaattagcagatatgatatttggaaatgttgaacatacaaccgaatattatattgaaaaatatccaaagagaaatctgaaagttggtgcaagagttacaagatatgcgccaagtccaactggatttcaacatataggtggtgtatttgctgcactaataaatgaaagattagcaagccaaagtgagggtgttttctatttaagaatagaggatactgatcagaaaagagaagtagaaggtgctatagaagatactatagctacaatgcataactttggtatggattttagtgaaggtatgacaggagaagaaacatctaaaggtgaatatggtccatacagacaaagtcaaagagctgaaatatataatacttttgcaaaagatttacttataaaaggtttagcttatccagatttctgtactccagaagaattagctgaacttagagaaagacaaatagcaaataaaataactcctggttactatggagaatatgcaaagtttagaaatataactgaagaagaagcaataaagagaattgaaaatggagaaaaatatattataagattaaaatctccaggaaatcctgaaaagagagttgagttccacgatctaataaaaggagatatatcattcccagaaaataatcaagatgtagtacttattaaaggggatgggcttccaacatatcattttgctcatgcaatagacgattatttaatgagaacaacagatgtcataagaggagaagaatggctatcatcacttcctatacacgttcaattatttgaagttttaggctttgaagcaccaagatatgctcatatcccaacaataatgaagcaagatggtggatcaaaaagaaagctttcaaagagaaaagatgcagaagcagctgtttcttactacaaagaagttggattcccagtagtaactgtaattgaatatttacttaacatagttaactctacttacgaagaatggagagctgaaaatcctaaggctgattatcatgaattcgaagttcatttagaaaagatgggtaagagtggagcattatttgatttagttaaattaaatgacgtatctaaagatagaatagctgctatgaaggctgctgatgtatatgaatattatgtagcttgggctaaagaatttgatgcagaaatgtataaattagttacagaaaatgaaactatggcaaaggaaatcttcaatatagataaagaaggtccaaaaccaagaaaagattttgcaaaatgggatgaagtaaaagataagattttctatttctttgatgaactattctataaggaatcagcagaacaaattgaacttccaaagggagttacattagaagcagcaaaagaaatagtagaaacttacaagaaagaatttaaatttgatgtagaaagtcaagaagcttggtttgatgacttaaaggaaataggaattagacttggctattgcgctaatagaaaagaatttaaggcaaatccagatcaatataaaggtatgatttcggatgttgcaggagcagttagagcagcactaactcatagaactaattcacctgacatttatactataatgcaaatcataggtgaagaaaatacaagaaacagatttgataagtttttgagtttataattaaaaatgcatggaattagaatatttcaaattccatgcattttttatattagcttaatttaaatgatgattttaatggtactattctattaaatactaacttatcatcagttgtatatttagtatctacattaaagaaaccatttctaaccatttggaatttatcttgaggtttagcatctttaaatgcagttggttcaataaaaccttgtaatatttctaatgagtttggattaatttgttcaaggaagtgctttccttcattttctggtgcatcatctaaaattaaaggttcatataacctgaattcagcaggaagacaagtttttgcatctacccaatggattgttcctttaacttttctgccagtaaagccagaaccactctttgtttctggatcataagtacaatgaatttctactacctcaccattttcatccttgatcacttcattacatttaacaaagtatgctccttttagtctaacttcattaccaggaaataatctgaagtatttctttggtggattttccataaagtcttctttttcaatatatagttccctagagaatggaacaagtcttgtaccttgagtttcatcttttgcattattctctattgaaagcatttctgtctcattttcaggataattagttattacaagctttaaaggatttaacacagccatagacaatggcgccttaagttgtaaatcctctcttataaaataatctagcatttgggaatcaacaacagaattagccttagcaacacctatagcgctgcagaaatttcttagagcatcaggagtacatccttttcttctaagtccagaaatagtaggcattctaggatcatcccatccatcaacaactttttcgtcaactaattgttttagttttcttttactcataacagtattagtcatatttaatcttgcaaattctatttgtcttggagtagcttccatttcacattctcttactacccagtcataaagtggtctgtgatcttcaaactctaaagtacaaatagagtgtgtaacatgttcaatagcatcttctaatggatgagcaaaatcgtacattgggtatatgcaccatttatcaccagtattgtgatgagtagaatgagatattctatatataacgggatctctcatatttatatttggtgatgccatgtctattttagctctaagaaccttttcgccgtcagcaaattcaccatttttcattctttcaaataaatctaaattttcttcaacggatctatttctataagggctgtctttaccaggctgagttagtgtacctttatattctttagcttcttcagctgttaagtcacaaacataagcttcacctttttttattagtagaacagctctattgtacatttcgtcaaaatagttagatgcaaagaaaagctcatcccaatgaccaccaagccattgtacatcttctttaattgactcaacatattctgtatcttctttaacaggattagtatcatcaaatcttaaatgagtttttcctttaaactcatcagctaaaccaaaatttaaaagaattgatttagcatggcctatatgtaagtaaccgttaggttctggtggaaaacgagtaattatctctttatgctttccgctttctagatcttctacaacgatatttcttataaaattagaagaatttatttcgtttgacatagtcttacctcacttataagtgtatttaaattaagaaaagaatatttacttgaagtagtattccctcttaactatattgttatttttgcttaataataattttaatctaatataaagaaaaaataaagataaaattatttaaattgcctaaagttgctaaacatgagcgtataaatctaaatttagtttggattttattattatgcatattgctatgaaaaataaacatgggataacctgtgtattataatattaacatttttaataacattgtttaggatttgatttgttttgagatagttttcttatataaagagattatagcagtattagtatttagtgaatttattctagtaataattattgttcaaattaaaaaatgaattgaatatttcattaaattgatgtaaacttgactattagttggaagattagcttatagtaagctatgcacacgtgaaactattatttaagctaacggaattattgcaagtaatttggtctataattccaaaaaagtttttaaaaattaaaggagaagtatgaagaaattattagcacttataattagaatgacattcggatttttattatgcgcattaggaactgtgttggctcttaattcgaatttaggattaagtccgtgggacgtatttcaccaaggattaacaaatgtaactagtttaactattgggcaggcaagcattatggttggaataataatagtagcaatcacaagcattttagggcttaaagttgggatgggaactatagcaaatatgatagtaattggatgtttcattgatttaataatacattctaaaattattccagtttgtaataacatatatacaggcataataatgttaattggaagcttatttgttacagctttaggaagttatttgtatattggatgtgaaatgggatgtggtcctagagatggtcttatgattgcattagttaagcgtacaggtaaaccaattggaataataaggctatttattgaagcaggagccctaattattggatggattctaggagggtttgtcggaattggaacgttagtcactgccattggaatcggatattgcgtacagttaatttataaagtatttggatttgatataaaggtactaaagcataggaatataaaagaagggttaaagtttgttaaagaatgtataactatcttttaggattctagtagaattgattttaactgataaacgaagatattgaagcaaaaaggcatttttttagtagactttaataagaaatttatagtatattatgactggtcaatataattccaaaactagttattaagttaaatataaacatatacttgaaaattaacataaatatatatataatatacatagcaacaaattaatagttataaaaacagcgatgataaaaactacgatttataaatttcttcagagagccgatgggtggtgcgaatcggtgaaaggttaaatctttccacttttggagctgtgcgtgataaatgcaaaggttagtaacctatataatactagtgtcgaggggctggttataatattaaccagcaatttgggtggcaacgcggattattccgtcccaattatattgggatggtttttttattttttgaaataataatatatatatttaatcaggagggaaaaaaatgttagacattaaattcgtaagagaaaatccagagattgttaaacaaaacataaaaaataagtttcaagataataagttggggttagtagatgaagtattaactttagatattgaacttagaaaagttaagcaagaagtagaagctttaagagccgatagaaataagttatcaaaacaaattggtggcttaatggctcaaggtaaaaaagaagaagctgaggaaataaagaaaaaagttaatgcggattcagaaagaatggctgagttagacgttaaagaaaaagaactagaagaaaaagttaaagttatcatgatgactattccaaacataatagacccaagtgttccaattggtaaagatgatagcgaaaatgtagaagtagaaaagtttggggagccagttgttccagatttcgaaattccatatcatacagagattatggaaaaattaagtggtattgatttagatagtgctagaaaagtagctggtaatggtttctattacttaatgggaaatatagctagacttcactcagctgtaatatcttatgcaagagattttatgataaatagaggatttacatattgtattccaccttttatgattcgtagccaggttgtaactggagttatgagttttgctgaaatggatgctatgatgtacaaaattgaaggtgaagatttatacttaataggaacaagtgaacattctatgattggtaaatttatagatacaatattaccagaaacttcacttcctcaaactttgactagttattcaccttgctttagaaaagaaaaaggggcacatggtatagaagaaagaggagtatacagaattcatcaatttgaaaagcaagaaatggttgttgtatgtaagccagaagacagcatgacttggtatgataaaatgtggaaagatacagtagatttattccgttcattagatataccagtgaggactttagaatgttgctcaggtgatttagcagatttaaaagtaaaatcagtagacgtagaagcctggtctccaagacaaaagaaatacttcgaagtaggaagctgttctaatttaggggatgcacaagctcgtcgtttaaaaatccgtgtagatggtaaagatggtaaatactttgctcatacattgaataatacagtagttgcaccaccaagaatgcttattgcatttttagaaaacaacttaaatgaggatggatctgtaaatattccagttgcattgcaaccatatatgggcggtatgacagtaattaaatagatcatatatatctaaatttagaaagacaacaaattaaagaggtattaagctcattaatttgttgtctttttcatacagtaaaatattattaaatattttcaataatattttgggtagtgaattaagatattatacatagtagtcattggggattataagaatagtttacataatattactttagtgtaaaacaaaaattttaaagaaattgaaatatatacatataaaagcaaaagttactgacaatgtgatataaatcacgctaaaaattcagcacaatggttataatattatcatctaagaaggagtttagataataatattaagggaggaattaattatgtcgagttttgctgttagtatagatgttagaatttatgaaagaggtcataaaaaggagattatatttaacgcttttaaagagcttgaacaaggtgaaacaatggagcttataaatgatcatgatcctcgtccactttatcagcagtttatagctaactttccagaacactttgagtggaaatatttagagcagggacctgaaatatggagaataggtatcacaaagaaataaggcacattcaataagagagaaaaggagttgttttttataatatgacatttataagtaaagatttataccaatttaatagctatgttgaaccaattaaccttacatttcatcaatatttgttattagggaatgaaccattattagttcatacagggaacgttatgcaggcagaagctttggtgccagaattaaaagaggtacttaatggtaaagagctaaagtatatttttatttcacattttgaggcggatgaatgtggaggtctatcattaatattagaacatttccctaaagctaaaacaatttgctctgaagttacagcacgtcagttaaatggttttggaataaaagcagaaattattactaagaaagcagaggaaactttaaatactgataattatgaattagagttcatcaattacccttcggaaatgcatctttgggatggattattagttatagaaaataaacgtgagatattttttagtagtgatttgatgtttgcattgggaaaagaaataggaacaataaaagaatctgactggaatacagaagtaaacagcattaagccagaacaaataccagataataataagctgaaagatttgcaagaaactttaaaaaagttaaagcctaactttatagctacgggtcatgggccatgtgttaaattaaaataaaatgaaggttatatttaagatagaaatttgttcttaaatataacctttttgttttgaattcaatattgaatattacaagaactaatatcttataatttaatattttgaatattgatttaaatcatagtatttgtctttctattttttaaattacgtaaccattgttacagatttaaacagagtattttagtaatatatatctgtagcacagagctaatatagaaattaaaaaaatattaattttattttagtaacgtatgttacagaaatgatattggcaatatagtaaactctaaattgtcaaagttaagagagattaacaaggaattattaattatttatataaaaagaaaaataggaaataggaggacataatatgtcaatgttttgttatcaatgtcaagaaacagcaggatgtaaaggctgtactaaagtgggggtatgcggtaaggatgagtatgtagcaaaggctcaagacttattaatatatgtaactaaaggactagctatagtaagtaatgaaggaagaaaagttggagttaaggatagtaaagttgataaatatataacagaaaacttatttacaacaattacaaatgctaattttgatagagattctattttagatagagttaaagaaactttaaaattaagagaagaattaaaagctaaagtaattagctctggtggtaaagttggagaagtaaaagtaactggtggtttctttaagaaaatctttggaatgcaaactacagaaatgattatgccagaagcagccacttggacagctgacaatacaatagaatttgatgaaaaagcagaaaaagttggagttcttgcaactgaaaatgaagatataagaagcttaagagaacttatcacttatggattaaaaggattatctgcttacatgaagcatgctatgaacttaaaatataataatgaagaagttcatgcatttatggcaaaagcattagctgctacaattgatgatactttaacagttgatgactatgtagctttagcattagaagcaggtaagtttggtgtagacggtatggcattacttgataaagctaatactgaaagctacggacatccagaaataacaacagttgatatcggagttagaactaacccaggtatattaatttcaggacatgatttaagagatttagaaatgttacttgcgcaaacagaaggaacaggagtagatgtatatactcacggagaaatgcttgcgggacaatattaccctaaatttaagaagtattctcactttgcaggaaactatggtaatgcatggtggaagcaaaaagaagaattcgaaaaattcaatggaccaatccttatgactacaaactgtatagttataccaaaggattcatataagaacagattatttacaacaggtgcaacaggaatgccaggatgtcctcatattgaacctaaatctgatggaacaaaggacttctcaaaagttatagaaatggctaaaaaatgtaaagctcctactgaaatagaaaaaggacagattgttggtggatttgctcataatcaagttttagcacttgctgataaagttgttgatgctgttaaatctggtgctataaagagattctttgtaatggctggctgcgatggtagagcaaaatcaagagattactatgcagaattcgcacaaaagttaccaatggatacagttatattaacagcaggttgtgctaaatataaatataataaattaaacttaggtgatattggtggaattccaagagtgttagatgcaggacaatgtaatgattcatattcattagttgttatagcacttaaacttcaagaagtatttggattaaagagtgtaaatgaattacctatatcatacaacatagcttggtatgaacaaaaagctgtaatagtattattatcattattacacttaggagttaaaaacattcacttaggaccaacacttccagcattcctttcagcaaatgttgctaaagtattagtagataacttcggaattggtggaatcactaatgtagatgatgacatgaagatgtttatggaagcataaaaataatttctggcaaattacaatggtaaataaaataagatcgatcaaataagaaaacaccctatttaataatctacaatatatttaaagtatataatcctagtagcatgattgctgctaggattttttaaaatgcttttaagagaatttattttaatttttaatatctatttagggatgatgcagatattcagcgatctattttcaataatagagaaattttcatatttttatagattaatagttttatataaaaataaatatatgtttatatattcctataaacatttttttctatataaatatgaaaatatataaatatttataggaaacatcaggggtaagagagcatagaagactaaataatagagaaactacttagtggctgcgtaaaatgaacttttaatatttaaagcaattttgagagcctaaatagtgttaagtgttatgcaaagaatcttatcataaattattttttaaatattcgtaaagacaaaaaaccatagataaacctatcatacaataagtttatctacagtccttaaataaagaaaataacaatcaaacctcattgcaacagactaacataattgcaattttcgcgtaaccctacaataactaatcaataatagaaaactcaaactataggattgcatctttatttctcaagttaagtcttttgactctatattgagaaggcatattcattcttgaatatttaatgcttaactgttaacttctttataatcttaatatgcccctaattatttagctaatactatgaagttaatagttatattggaaatttatcttaataaatttatcaaatggtatattattttttacacataaaattcataactttatgtcaatttattaagtatatgataatgtaacccgcattcagcatatcataaattgccaaactttccatttgagcatttatgatgtgctaattcaattttagtgaatatatttccaaaaatattggacaagtattctaaatattgtcatctatttttataactttaaaatttttacagtcaaagggcaaaatgcccttacccattatacatctttgtttttggaaaagatttctagatatatttcttcacctagtccgcataattttaaaatccgtttttgatttttatctaatcctccgggaataattctttgaattcctgctcctaaaggaattgctacaactttaactttttcaaaaactttgaataatgccgttgccgtaggcgaaaatgtttttcttctaccaagaagatttatttcttcagactctagttttaatttttcacaaattcgcctttctattaagttcattagcaatactgctagaaccataacatagccgaaagcttctattctttctggcttatttaaaaatatagcatctacataacttggtgattttaatatcttaaatgttgattcaacagagttttgatctttatattccataagcaattctttgttacttaagttttcctcatttaactcattagttataagaacaaacatcccaatttcttctttacgttgatttatcttatctttatcttcaattaattcgtactgaaaaatatatactttttctgtttctggaatttcatctttttttcttcgtccttttactccagatcgcttctttatttgttcattctcctgcattgtgtattttagggtatggtacttgagttttagtttatcttcaaatttaagaatggctttctgtgcatccgcctcgcagaaataaccatctcttgaaatagctttatcaaatgctttctttgtttcactcttttctttttctatattgcgttccaaagttttcatattttgttcagccaggttagatgaatgacatacaacaaaacgatatttcttttcaccaataacatccttaaaactttgtattctatatttgcttgctctttttttattcttacctaaagtagataagtcttcccacttttcaggggtccttatagctttttttataagcttcgcttcgagactgaaagtacccggtaatcttgagataaacttgtatgtctcatcattaatttctttaagattatcggtggtaactaatgcactatcggcaacgtgaagaatattagataaatcaacacttgaaagttcttcctcaattcttttaattacattgccattccactttttatcatcttcatttccgcttaacacatcacagaataatggaagtttatctttggtagttccaactccaaacttcatttgttttaaatctcttctgtaatctttgctatgcccaaatgtaatattaattggatattttttatcatcctgtacttctggaattacgcgttcgtaatcacctgaaaaacttttagatgttgtatcccagtggatagctttaacgtctatgttttctagttttaatgctgttaagactacatgcgaatatacttttttagcatctgaatcatagattttgtctaagtttcttcctatggcaaattcgttaatttcagtgtaattaatgctttcgcctacgagtttttctacatctttatctttataaaattctgatatcatgtacaatggatcataaccacttaaaatattaagaattaaagcttttactgcttcacctggcgacaatttacatttttctttatcccagcttactacctcatctattttcttaccaatttttaattgatcataaacacccgacacgataggcaggtgcccttcggaaaatatctgcatatcattaatatccaatttcaacaccctttcaatattggataaaataataatatcattctttaacttttatgtttagaaacaatattttccattaatacatgtgctgaatgcgggatgtaatattagggagaaattatatggggtgaaaattatttataatagtttagtaattggagatgagaaaagtgtaacagaagttttgaagtcatatttggaaagagaggtatatggagtttattcaaatatgtttataaaagtgcgcagaagaatttctgtactttttttatatcctcataaaatcttcataactttatattataatctatatatgtaatttgagttatgatttaaaatgcatcactgtttataataagcagcgatttattaggaggagattatgagtattaagagggagaatattaaagtttatgatatgacatgtacgtcttgcgaaaatagagtggaaagagctttaatgaaaattgatggagttttaaatgctatggctagctatagtgcacagcaagtaacagttgaatatgatagcaagctttgcagtatggaacaattaaaagaagctattaataaggcgggttatagtacaaaaaattcggttagcttaaaatttgcaggctttttagttatagcagcagcagtcttacttcttggcaattcaacagcaggatttgatatgagtgctaagttgaataatgcatcttatgtagtgttatttattgttggaatgctcacatctatacattgtgttggcatgtgtggtggaataatgcttacacaaagtttatctaaaaatagcattataaatgaaaaagaaaataaatttaaatctttgaagccttcgattttatacaatgctggaagagtaacctcatatacaattataggtggtattgtaggtgcgctaggttctgttttatcgttatcgcttaatgtaaaagctggattgcaaatatttgcaggattatttatggtaataatgggattaaatatgacaggcttttctttatttagaaagcttaacattaagctgccatggtcatcttgcaaaattaaaaataaacctaaggctccgtttttagtcgggatgttaaatgggttaatgccatgcggcccacttcagacaatgcagctttatgcattaggtactggaagtgccataaatggagcaatatcaatgtttttattttcactcggaacagttcctttgatgcttatatttggtgctgtatcaggtttattaagcaagggatatacgaaacaacttttaaaatttagtgggattttagtagtggtacttggattaataatggggaataggggattagctcttgctggagttggaattcctaatgctagtacactagcaaaaaatctttctggagatggagctcaagccgcgcaagccaacataggcaaggcaacgatagaaaatggagttcaagtaattagaatgacagcagataataatggatatactcctaatgcattttacgtacaaaaagatatgccagttaagtggataattacagggaaccaaataaattcctgtaataatgcagtggtagtaccatcacttaacatacaaaaaacattaaaatctgaagaaaatgttatagaatttacacctaaagacggagacataaactttagctgttggatgggaatgataagagggataattaaagttacagataatcttgattcagtggatacatcgaaagcagattcatcaattccggctcctagtagtggtatgagttgctgtacaggaacttcagcaagtaatactcctcaagctccaagtatatatggtgatgatttaagtaaagtttctactgataggttaattaaaaaagctaatatttcaggagacacccaaaatctaagtataaaaggaactggttatgaatttgaaccacttgtagcagttttgcaaaaaggcataaagactaagctttctgtagatcttaattcctttgataaggctgatggagttttcataatatatgatgcaaatagtggagatgaggtaactacttttacaggcagaaaagatgtagtaaatgtggaatttaatatagacaagagtggaacgtatctaattgttaaagacaatgtagttgcaatgggaatagaagttacagactcattaaaaactgtaaatttagatgaagttcgtaagaaacttataaatgaataaagaataaatgagaattaaggctggtatatagcaaattaatgtatatcagtctttttttccgtttagctaagataaatattaaagatatttattataagcagataatgcatatttcaattcacagtgcacatttcacaattcacaactacggctaaaattcttgcaatatttttagaattatgatgaagaattatttttgtaacatatatacaataaaaaataaagaatttcacaaaatcgacacaattatgatgtattattatctaacaattaggtaaatgaagtttataaaaggtattattgttaataattaaagatattagtaagtaactatgatttaaggaggtttttatgagaagtaagttagttaaatttataataattgcagcttcaatatttacattagtttctatttcagattacttacctaaaaataatggcatgaatagtacgagtaatagtgtaagcaattttgtaagagcactaagaagcggtgatttagatagccttctaagtagagtgaaagatataataagtgtcgataaaaataataataagcataacttagtgttaccaagagacctagaacaatacattttagatgaaattggtgatataaaagggattaaaataatcaatgagcctaaaattataagaataataaaaccaatacagaagactccagtaaaaagtgattttaaattaggagagataaatgaaaataccaataaagctgtaaatgatcctggatataagtatgagtgggatataagctacacagaggcagataaagcatggcctctaataaaacaaaaaagagaaattaaagtagcagttttagatacaggagtagattatactcatccagatttaaaaaatagagtattaaagagcaagggatataattttgtagataataattctgatactatggatgacaatggtcatggtactcatgtatcaggaataatagctgcaaatgctaatgacaatattggtatagcaggaattgatgggacattagacgtaaaaataattccgataaaagtactaaatagcaatggcgaaggtgaggtaaatgacatagttagggggattaagtatgctgcagataacggagctgatataattaatttgagttttggagctaatgagaagagtaaatcaattgcagaagcaataagttatgctaagagtaaaggcgcatttgtagtagctgcggctggtaatgataatgaagatagtgataatatcagtccagctggagacggagcttttacagtagctgcaatgagttataattataaaaaggcatcgttttctgattatggtaattgtataaaggtttcagcgccaggagtggaaatattaagcacagttccaggtggttacgaggcatgggatggaacaagtatggcagcaccagtagcaacaggaatagcagctatggttaaagcagaagatcctaatttatctccaagtcagatcgaagatgttttagatagtactgctaaggatattatgtccaaaggtaaggataagcaatcaggatatggacttatagatgcttataatgctatcgaaaaagtgaagcaattagaaaagtaatatagagaaattatatttaaagaagttaatcaataatttatataatggttagcttcttttttgtttcatgacaaaatataacttgtaatcatactatatattaaaaagttttaggagaaaaatcaatgaatgatgctttgaaaagttgtccttttacactaaatactactagaatttgtgctgatgatgaattagatacttctatagaaatatctaaaattggttttaataatatgaaacccaatgttgtcattttagtcaataaagatgaagtttttgatggaattgcagcaacatccttagttcatttcccaattaatgcatcacttttgtttaatgatggtaatagtttaaatgaaaaaaccttaggagaaattgagagattatcgcctaaggggtataatggagtacaagtaattttagtcggtaatatttctaaaaatgtatcttttgcattaaacgatcatggttatacaacaaagcatatatcaggtcgtaattattacgagactgcatgcataatacctaggataagaaaagaatttaataatattcttataatttcaggggaagattattcagaaggaattattgcggggtattggtctgcacatcatggagatcctattctatttgtacaaagaaatagaattcctaattgtactattgatataatcaagaaagtgaatgatattaatatttatataattggttcaactaaaacaatatcaaaagatgttgaatactatttatcaggattagataatgttaaaaaggtagacagaataggtggtgaaaatccttacgaaatagcagtgaatttttctagatataatgatacgaaaactgattttggatggggacgaaattatagaggaggtcatgcttttacatttggacaacttaatgagccaatgaaaattatagctagtgtagtatttgctcatatgggaaaacatactccacttcttttaattgaaaaagataaaataccagaagtggtaaatagatatattaacttaattaaacctatacagccaaaaggaatgccaaggcctccatttatgcacggttttatattaggggatgtttcaaatataagttataaagcacaaaaaatagttgaaggaatgctttctattgatcagcacatgatgaatagtgaaaatatagaagatatgacggggacaatgaaagataatgttatgaatgttagtaaagaaaatatggcgatgaataatggaatgcaagagatgaatgaaaatataaaacatgattctatatatggtaaggagtatatatttgaatggaggaatttgggctatagaaaagttaatgcagatgaaatactataattttattctttaaattatcacaatctttcttattcttgaatagaataatatttggaaggagatggtttaaagaatggatgtagaaaaagataactacagagatttaagagacctatatgataattgcaaaaaatacatgtattaccgagcaactttaataatgacagatggaagtacatttgatggaattattgaaaatgtagatggagataatgtttcagtattgattggtgaagatgtaacagagaaagaggatgaaggaaattctaatcagcaaaggcaatatggaagatacggttataagcctagatttagacgttacagacgtagaaatttcccacttgcagctttggcagaaatagctttgttaccttatatagctccgccagtaccttatccttattatccgtacccttactatccttattagagatatacttaaagaaaaagcctgatagataaaatatatgatcttgttagaaacaagtgtatttataatgttttgtaggcaattgtttaataagaacaattgccatttgtactaataagcataatgcaggattctacagatatctatattttcaaaaatcattataaccatcagatttattaaaaaaatgagctaaataaatagtttaacgtgaactatttgatgttttctaagtttgtcagttattttaaattagataattgtccaacagattgacgttcgactatttctacatctaaagttattttattgtttgatacagaacccttttctatatactctatgagtagatttacagcttttgttgcttttgactctatatcttgagaaatagtagtaagttttggcgtaacataaacggatggtagaagattatcaaaaccaataactgataaatcattaggaacaatttttccgtttaatttagcaccttcaattataccaattcccataatatcagccgttgtaaatacagcagtaacatcaaattctttattacatatagacctgcctaaattaataccaacttcgtagttaggctctacatcgactatgagactttcattaaactcaatattagattctaataaagcatctttataaccttcaagtctttttataatctgaggaattggaacaccatctttatgacatggccctgcaaatagaattttcctatgtccattgtttataagatagcgagtagctatgtagccacctttataatcatttatacctacacttattatgttatcaatttttgaataactatctagaaataccattggaagtttattttcttttaatattgaatagataagattgtcatagtcaggcattaaaaatatagcaccatccatattccaatttttaagcaatgcagatatatctgaaacatccttaactgagcgaaccattaaatagtatccgttttcacgaactacattttgtataatgccaaataattcactaatataaggatctttaaacaaattattaaacgaacccttaatgggaactataactcctataattttagaggatttagctgtcaagcttcgtgcagttagattaggaacataattatatttttgtattatcttttctattttttctatagtcttttttgatacttttgaatgatttccatttattacatttgatactgtcatgatactgacaccagcttcagctgcgatatcttttagtgtaaccataattgcctcctagtttaccgatatactattatgaagataagtgtatatagataatattaatatatattacatattattgcaatgagagcatatgcattaataataagaattaacgtatggaaaagatacttcatgacatttaagtataagaaaagtaaagtatttagagtaggtttaatcactaggtttactagacattaaatacttgaataaacaaaagaaaagtactaagaattttttagttattaaattagctagatataatagtaaatataaaaaatgtagataattgaggtaaaaatgcttatgaaaacgattgacagaaaaaagaaacaatgttaatcttatgatatagtttagcgttaaacataatgactcgaagataggcataataatataaatataaatcatattaatctaaataaatgtatatgaggtgaaaagatatgaggaaaaaagtgttagcagcattacttgcaagtactatggtaattggttctttatcaggctgtggaagtagctcgagtcaagctagttctgattctaaaacatcaactgggaatagtgaagcaattcgcttcgtaaatacgaaaattgaaattgacaagccactaaaagaatttgcaaaaaaatatcaagagaaaactggacaagaggtaaatattgaatctcttggaggtggagtagatgttaatggacagttaaagaattatttagcagcaggaaatatgccagatatatatgcgtttggaccagattcgtatgtttcatttaaagattatttaacagacttaagtgatcaagaatgggtaaaagatactgattttgcatttaagggtgatgacggtaaggtgtatggatttccatttgctattgaaggtattggattagtttataatgcagatatattgaagaaggctggaattgatccaaagactttaacaaacatcaatgcttataaagaagcgttcaaaaaaattgatggaatgaaagagcaactaggtattcaagcggttgcatcagtagcagcagaatcaggacagatgtactggtcaactggtaatcatattatgggtgcttatttatcagaaggattagatagaaaagataaaaagtatattgatatgttgaataaaggacaattagacgatgatcgttttggggaatttgctgactatgtaaaattattatttgattatgcagacaagactgttttaatatcaggtacttacgatgatcagttagcattatgggcaaagggaaaaactgcttttattactcaaggaaattggatagatccttctttagcaacatatgatgtgaagtttgattgcggaattgcgccaccagcatttactacaaaagataccccaggtattttagcagatgcaccagcttattggggaatttataaagatagtaaaaaaatagatgcgtgcaaagaatttcttaaagcttttgtctctacagaagaaggtcaaaaatgtttgataaaagatagtggaatggtttcaccatttaagacaagcactattgaaccagacttacctctagcaaagagtgagagcaattacattaaaaataatcaaacttatgcatgggattggacacatatgaaagatggtattgcaatgaattctacaggacctgtttttgaattatatgctaaaggccaattagataaagatggatttacaaaggcaatgaagaaagcagtttcagattatatggcaaaataataactgtagtataaattatataggttacttacaaatagagtaacctatattaattgtattttttgtacatgtgaaatattaaaaggggggaaagcataagcgcaaagtatgggcaattacaacaatgattataataatcattcaagtttaggaggaaaaagcatgaatacaaatataaaaagattgctttcaatcggagtaatgttggttggcattttagctatggcttttgcactatatctagatattattggtagtaaaaacacgatgcgtggaactatattaattgtaggcgctttattagtaatcttaggcttatatagttttccaactaagaagcatagaatgataattaatgtcttatttctatttccattgctatttgcattttttgtaactgtgttaataccatttgtatgcggtgttttttattcctttactaactggaatgggattaaatttacggaatttgttggattaggcaattatatcagtatgtttaaatctgaggactacgtatattcatttatagtaacttttatttttacagttgttaatatgattcttgtaaattcggcagcgtttgcattagcgttattttgcacatcaaaagtaaaaggaaaaaatttttatcgtgcagctttctttataccaaatttaattggtggaattgtgcttggttatgtatggcagtttatctttaataaggtattcacagttgtgataaatggtagtgcgtctatgcttacaaaccctaatttagcattgatggcaattctaatagttagcacttggcaatatgcggggtacattatgatgatttatgttacaggattgcaaaatgttcctcaagatattcttgaggcatctagtgtagatggcgcaagtggctggattacattgtttaaaattaagattccaatgattgctaatacttttacagtttgtatatttttaacattggttaattcatttaaacagtttgatttaaatttagcaataactaatggtgctcctagtagaattctaaatggagatatagtgcaatcaacagaatttttagctcttaatatttataatactgcaatcggtaaaaaccaatacgctcttggacaaactaaggcggttatattctttattatattggcagttgtatcactaactcaggtgtatataagtaagaagaaggaggtagaagtataatgaagtcgataaaaacaagaaatgtgattggagaagttattggaattatacttgcccttataattctttcgccatttatcttagtaattttaaattcagctaaaacaagtgcagatattgtaatcagccccctttgtattcctaataaatgggggcagatgttgacaaactttaaaaatgttatacacaatgacagctttaattattggaaatccttttttagttcattatttattacagtcgtttcattgactttgttgtctttattttcatcaatgacagcgtgggtactttgccgaaataagaaaaaatggtccggatttatttttatgcttcttgtggcagctatggttataccattccaagttgttatgctccctttactttctacattcagaaatatatctaattttctaggaattcaaatgctgcaaagttatcaaggtgtcatatttgcttacctaggatttggtggaagtatgtctgtctttatccttcatggttttataaaaggaattccacgggaattagaagaagcagcatggattgatggttgcagcccagaagggactttctttagaattatctttcctctactaaagccagttcaaatgacaattttgattttaaatggaatttggatatggaatgattatctattaccatcattaatgttggggttaaatggtaagataaaaactcttccagtggcagtaagtgcttttgtaggatcttacgtaaagcaatgggatttaattctttcagctgcatttttagcaatgataccaattatcatcttattcttatttgctcaaaagcagataattaaaggcatagtagatggtgcaattaaataagtaataaatttataaaataatagatagtcgaagtaaaagatatcattaataaaaatcttaagtgttttttgaataagagcattttcagaaaatgttgaaataatggaggtactagtgtatgggaaaatatcaggaagaaaaaatgaaatttggtaaaatgctaagtcataaaatcgaaaataacgtaatcaatattagattccaagagaaagctgtttttataaaagtattgaattcgtatataattaatttctttgtgcctttacatagggaggaaagaaattctaaagcagttgaaaatttaaaagatgattattatgattttcaggttgaaaatataacaaatggaattcagataaccacagaaaaattaatttgtaagatatatgatgaatttaaagtagatatttatgataagagaggaatattgctatgtgcagattatagaggtgaaagtaaaccttttaaaagaagatatggtgattatatgcttgcagaatcagaggggcattctcttagggaagaatctgattacaaggtatatgtttcaaaaagaatggaagaagaaatgtatttctatggttttggagagaagacagggcatttaaataagaaaggatatcattatgtaaattggaatacagataatccaaagccccatggagaaacatttgataggctttataagtcaattccgttttttatcggattgagcaaagataatgcgtttggaatattttttgacaaccattttgagactcattttgacatgggaaaagataattctgaatattattatttcgctgcagttgatggaaatttagattattattttatttatggtccatcagttaaaaatgttattaagggatatactgaaattactgggaatatgcctttaccacaaatatggactcttggttatcaacaatgcagatggtcttatgattcagaagaaagactcatggaaattgcaagcactcttagagaaaaggatataccttgcgatacattatatttagatatagattatatggatggctatagggtatttacgtgggataatgaaaaatttcagaatccagaagcaatgattaaaaaattaaatagcataggatttaaagtggtaactataatagacccaggagttaaagttgataaaggatataagatctatgacgaagggctcagaaaagggtattttgcaactgacaaatcaggtataacatatgtaaatgaagtttggccaggagatgctgtttatcctgattttttaaattcaaaggttagagattggtggtcaggaaatcaaaagataatgatagattcaggtgtgagtggaatctggaatgacatgaatgaacctgcaagctttagaggaccgttaccagatgatgtcatgtttaataatgatggaattacagttaatcataaagaagctcataatgtatatggccatatgatggctaaagctacttatgatggagttaaaaaagcaactggaaagagaccttttgtagtaacaagagcgtgttatgcaggaactcagaaatactcaactgtgtggacaggagataatcaaagtacatgggagcatttaagaatgtcgattccaatgcttatgaatctaggacttagcggaatggctttttgtgggactgatgtaggaggctttggatacgattgtactggggaattattaagtcgatgggttcaagtcggagcatttactccactttttagaaatcattcttctatgggaacaagggatcaagaaccttgggcatttgataaggatactgaagaaatcaataagaagtatataaaattacgatataagctaattccatatatatacgacatgatgtgggagtgtagtaagagtggagcaccacttataaggccgcttttatttaattatcagagtgataaaaatacttacgaaattaatgatgagttcctttgtggagataatattttagttgcaccagttgttgagcaaggattaaaagctagaaccatatatcttcctgaaggggaaacttgggtagattattggacaaaagaagaatataaaggtggacaatatataattaaaaaaactccactagacctatgtccgatatttattaaaggaggaacattgattccagtagggcaagtacaaaattatattggtgaaaaacaatctaattcattaactatagaagtttatctatctaatgataattctgatactgaatataatcactatgttgatgatggagaaagttttaaatatgaattaggagaatttaataattataaatttaaagtagtcaataaggagagcgttgaaataaaaattgacttgataaattatagatatgatgacaaatatgaaaatatagaatttatcgttcacaatttaaataagaaagctttagtcataaatggagaaacagtggaagttataaatggcaaggcgtttatagctaatccagcaagataaatatattcaatagtaatttaggaggttttacgttatgaagaaatggtggcacgacaaggtagcatatcaaatatatccaaaaagtttttgtgattcaaatggagatggaataggtgatttaaaggggattattagtaagcttgattatttaaaagatctgggagtggatataatttggttatcaccaatttattgttctcctttagtagatcaaggttatgatatatctgattattataatattgatccaaggtttggaactatggaggatatggatgaacttctaaggcaagcaaaaaaaagaaatatgtatatattaatggatttagtagtaaaccattgttcagataagcatgagtggtttaagaaagcattggatgatccagaaggagaatatgcagattatttttatattcgtgaaggtaaaggtgataatcctccttgtaattggcgctcttactttggtggaagtgtatgggaaaagatacctaatactaataaatattatctgcatttatttgcaaaagagcagccagacttaaattgggaaaatccaaaactaaaaaatgaaatatttaaaatggttaactggtggcttgaaaaaggattagcaggtttcagaattgatgccattattaacataaaaaaggatttgagatttcaagattttccagcggatagagaagatggactttgtagtatagatagaatgctagaagtagcagaaggcgtaggagatatgttacatgagttaaaagagaaaaccttcgaaaaatttgatgcatttacagttggagaagtattcaatagaaaagaaggggaacttgataaatttataggtgaagacggatatttctcttctatcttcgattttgagatggaagtcttgggaaaaagtgaatttggttggtatgataataaacatttttcaattaacgagttaagaaaagctatttttgacagtcaattagagacaagtggagtaggctttaaggctaatattattgaaaatcatgatgagcctagaggcgtaagtagatatattcctgaacaagacttaaatgatagaagcaagaaaatgcttggggcaatatcgcttatgcttagaggaataccgtttatttatcagggacaagaaattggaatgacaaataataaattcaattcgataaaggagtttgatgatatagcaacaatagatcaatataatgtagctattgaaaaaggatatagtaatgaagaagcactaaaaattataaatatatttagcagagacaatgcgagaacaccgttccagtggaatggaagtgaaaatgcaggttttacaactggcaggccttggcttaaagttaatgaaaattataaagtgattaatgcaaattcacaaattaaagatgaggaatctgtatttaatttttataagaaactcataaatttaagaaaatcagaagaatttaaagatgccatagtatatggagaattcgtgccgacgttagaggaatatgataacttatttgctttttataggcaaggagaatctaaaaaattaatgatacttgcaaattatcaaaaggaagagcagattattgagttaggtaaacaatatgttaaagtgttaatcaataattgtgaagaaataaagaaagataagaataaaatcatattgcaaggatatcaagtagttattcttgaagtttagtaaagaaaatatatttataatataaatattgaagaaatataatggaattctctccaaaagacttggggagaattctttattttgcaagaaattatagaattttagaaggtaaatatctgactttataaagatttaagtatgtaatgcatgtgcaccaaaaaaatttaaacaaggaaaataaaattactaggagaatggtgtagctgccttttaccttatttttaagtgatacttatgaagtatattaatctattgtatactaaaatattaatataaaagtaatataataataaataaaacttaattatttttgtgctataatgaacgggaataaaggaaattaaatttttggacataatttatagcataatatataaggagaatagaaaatatgaaattcaaatcatttatatcaaaagcaattatttcatctttagctttgagtgtgttttttacttcagtaacaggaggacaggcgtttgcagattcgtttaaatctgttacgttaggagctgatttaagcgatgctcagaaggcagaaatgttaaaatattttgaagtaacaaaaagtgatgctaatgtattagaggtaacatcaaaggaagaacattcatatttaggtaaagttgcaacagaagctcaacttggtaataaagcaatatcatgttcttacgtagaaccgacagaaaaaggaggaataaatgttactacaaacaatcttacttgggttaatgacggcatgataaaaaatgcattgattacagcaggagtagaaaatgccaatgtaaaggcatctgcaccatttaaggtatcaggaactgctgcgcttacaggaatactaaaaggctttgaaaacagcagcacaggaaaaaagattgatgaaaataaaaaagaagcagcaaatgaagaattggttactacaggagatatcgcagaaaagatagggcaaaatgatgctagtaatttaatgaatgacataaaaaaagatgtagtaaaggaaaaaccgaagacagatgaagaattaaataagatagtagacaaggctgttaaagactataaaggaaacttatcggatgatgatatagctaaaattaaagatgtaatgagtaaaataaattcattagaccttaactataataatttaaaagcgcagatggacgatgtaactaatcaattaaaagataagctaacaagcaaagaagcacaaggtttttttgataagttagaaaaaatgttctctgattttttaagttcaattaaaggtgcattttctaagtaacagattaaaagtttatcttagtataatttagttaaagtaagaaaatgtgaattttagttgccattcttgagtaatatagtaatatatgatataattactaataagaaataaatgaatatattaagttgtacggttgggcaaattttataatttgctttcaagcaattttagtttctggggtgggaaactcttttttgagtattcctacctcttttttgtatagatttttaataaattaagaattaaataaaaaattaaattaatctcttatttatgctaagtttttgggaataaataattatgtgaaggagagtaaagtatgaaaaacaaaattcaaaataaaattttaaatccattcgtacaattttttaagaatgaatcttctagtggtctagtactgctgttttgcgcaattattgcaataataattgcaaattcaaatttctctagtatgtataataatataattcatacttatataactattggatataaagatttttctttatcaatgtcagttttgcactggattaatgatggattgatggccatattttttttggtagttggaatggagataaaaagagaaatagtatttggtgagctcaaatcttttaagaaaactatattgcctgtatcagcagctataggtggaatggtcgtgccagctataatttatgtgctatttaattttaaccaaccaactataatgggatggggaattccaatggctacagatattgcgtttgcattaggaatactttctttggttggtaaaaaggcaccaaaaggaataataatctttcttacagcattagcgatagttgatgatttgggagctattatagtaattgctatattttatacaagtgaaatttcatggattgcattaatcctaggtttgattatttttttagcgattattttggctaataaattcaatattaagaataaatggttctatattgtttttggaattatgttatggatttgtttcttaaaatctggagtacacgcgacaattgctggagtattatttggaatgggattacctatcggaaaaaacatggaggaatttagaacatcaattttgtatagatttgagcatttcttaacgccattatcttcatttataattatgccaatatttgcattagcgaattcgggcataactatagatattaatagtttatcaacagcaataataagcccagtaagtctaggtataatttttggattatttattggaaaacaaataggtatttttggagcttcttatattttagtgaaattaaaacttgcaaaattgccttctaaagtaaccaagaggcatttatatggagcaagtgtacttggcggaattggatttactatgtcactttttgtttcatccttgtcatttacagaggaaagtgttttatctatggctaaaataagtattataattgcttctattctatctgctgcatttggagctataatatttaaaataataaaatttaaaagtgaagagcgagtgtaatatagattccaggaaaaattagaacttatttttctaaaaataaagacaaaggaagaatagttaaagttttgtaatacaagccatctgtactagttttgttaagatttttataggttatattttgcgatagtggttaagatattactgccaaacaaaattaaaaattaagggaggtagattcatatggcttcaaacaataatggaacaaacagaacattagtaccagaggcaaaacaaggattaaacagattaaaaacagaggttgcttcagaaattgggttaaacaattatgaaagcatggataaaggaaacctttcttcaagacaaaacggtagcgttggtggagaaatggtaaaaagaatgatagaaagctatgaacaaggactatagaagataaataaaagcagatgtactgagtttattctcggtacatctgttattttgattatatgaatatataattttatataacttcggcatagtatgtaaacaataagtattaagcttattgttttttttattctttagtaatttatattccggtaaaatctgtggatgacttaaaaaaggttgattaaatagtttgggtattttaaaaagaataaaaaaagaaatcttattcgcctgccaaatttttctcacatgcgttcgaaaaggcagatgcgtgaaaaaaatctctggctccacagtcgcctgcaatttttttattggaaatactgaaaattattctcatttctattgacaaaataaagtgatgttgaatataataaacatatgaacagatattcatatgttcaaacgaagaggtgatgagtatggaaaataataatattgaagtttgtaactgcactataattcatgaagatataatcaataaggttaaggaatctataccagaagaagaaacactttatgatttagcagatttatttaaagtacttggggattcaacaagaataaaagtactatgtgcattatttgaagctgaaatgtgtgtttgtgatatagcagcgttacttggaatgactcaatcggctatttcacatcagttaagagttttaaaacaagcaagattagtgaaatataaaaggaatggtaaggtagtttactattcactagatgatgaacatgttaaaagcatttttgatcaagggttgattcatatatctgagaaaaaataagttttagattgggggaaacattatggcaagcaatataaaaatagctagtggtcctgttaatgcaaaattgtcaaagaaagataatataaaaaaagtaaagaaagaatttattttagaagggcttggatgtgcaaattgtgcagctaaaatagagcggaaaataaatgaattagatggagttaattttgccaatgtaaattttcttactaaaactttaatattagaaataaatgaagctaataaattagaagagttgatgggagcagtaactaaaattgtaactaatattgaatctcatgttaaagttgtagaaaaggtaacggagaaaattttaaaaaaagaaatcttacttgaaggattatgctgtggtaactgtgctgcaaaaatcgaaagggaatcaaataatatagatggtgtgaaatctgcactagtggactttatatcaacaaagcttattatagagatggaagacccagcaaaagaaaatgccattattgataatgttaaacgcattgtcaaaagaatagaaccagatgttaatgttgttgaaattgatggaatagataaaagagctatgagcaaaaatgaaaaagttgaagagggcaatgataagggggaaatcataagattagctattggtgctataatttttggagcagctactatttttaaattttcaaattatatagaattattattatatctaataagctatattcttataggtggagaagtggtcttaagagctctaaaaaatatagctaaaggtcaagtatttgatgaaaatttcttgatgactatagcaactattggtgcttttgcaataggcgaatatccagaaggggttgcagttatgcttttctaccaaataggagaaatgtttcaagatatggctgttaatcgttctagaaaatccatcacatcacttatggatataagaccggattttgctaatttaaaaataaatgatgatttcaaaaaagtagatccagaagaagttaagcttggagatattatattagttaaaccaggtgaaaaagtgccattagatggtgaaataattgaagggaactctatggttgatactgctgcgttgacaggtgagtctattcctagagaagtaggggtaggagacagtattttaagtggagtgattaataaaaatggacttttaacaataaaggtagaaaaagaatttggagattctactgttgctaagatattggatttagttcaaaatgcaagtggaaaaaaagctccgacagaaaattttataacaaagtttgctagatattatactcctgctgttgtttttgcagctttagcactagctgtaataccaccaattgttattgagggagcaacattctcacagtggatctatagagcattagcattcttagttgtatcttgtccatgtgcattagttgtatctatacctcttggattttttggaggaataggtggagcatcaaagaatgggatactcgttaaaggagggaattaccttgaagcgttaaataatgttgaaacagttgtgtttgataaaacaggaactcttacaaaaggaatatttaaagtgacagaaataaggccagaaaataatatttcaaaagatgaactcatagcttgtgcggcttatgcagaaaattactcaaatcatccaatagcaacttctatattaagagcttatgataaagagataatcatagataagataaaagggtatgaagaaatatcagggcacggcgtaaaagttgttctagatggaaaagaggtattggctggaaactacaagttaatggataaggagaatatattttataacaaagtagatgaaataggaactgtagtccatattgctatagaaaagaaatatgcaggttatattgttatttcagatgaagtaaaagaagattcatcaaaggctatcaaagctttaaaagaaataggtattaagaagacagtaatgcttacaggtgataataaaactgttggaagtaaaattgctaaggaattaggtttggatgaagttcatgccgaactattaccagatcaaaaagtagaagagctagagctattgtttaaagaaaaatcacctaaaggcaagatagtgtttgttggagatggaataaatgatgcgcctgttctagctagagctgatataggtatagcaatgggtggtgttggctcagatgcagcaattgaagctgccgatgtagttataatgacagatgagccatcaaaaatagcttctgctataaagattgcaaagaagactagaactatagtaatgcaaaatatagttttcgcattaggtattaaattgataatattggcgcttgtagctgtaggtatgggaactatgtgggaagcagtatttggtgatgttggagttgcattacttgcagtcttaaatgctatgagagctatgaaagtagataatatataattataaattagtgtagtcataatattgctatgactacactttttaaatataaagtttttacttatgtgactaagtcacacaaatttattaaaaaaagaatataatacaataaaggagggttgaagtgaataataggattgaaatatcaagtgggaataggttggaagatataaaatctctatataaggtatatccggtgctatatgagattaataaaaagaatgatgaagtaataaacgaacaagccaattttaaaactttatacgctgatgaatatgtagaagctacagagaaagcatgtaaaggtatattatttgttataaaaggtgtaataaaaatacaaaaaattaataagaatggtgaagaaactaatctctataatataagccaaggtgaagtttgtcacgaagccttaagctgcttatcagatttggaatcattaaatataacaggtaaggcaatccaagattctaaggtatgcataattccttttgaagtggttaaaaaatattttattagtaataatgacttcttattatatatatataaagatttgtataataagtttaatactatcataggaaataaagaagaaattattcatgaatctcttgaaacaaggcttataaaattattaataagcaagaaaagcaaaataatttatgcaactcatagtgaattagcttttgaaattgattcagttcgtgaagttataagtagaaagctaaagaatttagaaaagctggggtatataaaattagaaagaggtaaaataatcatacttaaggatttaaataaaatattaaaagacaattagagatgagaaattaggaaagcattttaggaggaagttatagtgtttgaatttttaaaaaaagatgatggaagagttattaatgtaaatgaaattgatgatttaataggaaaagttgaattgattgatataagagaagaatatgagtataaagatggaagtataaaaagtgcaaaaaatattcctatgggagagcttttagatgaaccagagaaatacttaaacaaaagcaaagaatattatataatgtgccaatctgggggaagaagtgcaagagcgtgcagcaatctaagaaatcagggtttcaaggttataaatgttgcaggtggaatgggctcatatataggaaacaaaagaaaataaattacataacagtagtttttattattatcagtttgcaaacaaaaattattttactagattgaggggattaaaaaatattgtttatttgcttcatgcaaataaataatattttttactataactaatttaaatgcttgtactatttatgttttttacccaaaggttcatgtcttcaaaggtaccgcatatattacaattgtttactagtctgccagcaaaattataattatgtttacttaggacaaagttaatgctaggatttattgatctagataaactatataaacagacaaagcccttagtttttaagtcagattctaaggaatagataatgtttgataatatgcctattcctctataagatggatgagtagcacagtcagttatttcagcattcaaattttctttattcatatctgctgaggctatgctgattatttttccattatatacggcaactttgtatagaactttatcattcattgtttgttttaaatattcttcatcataaataggtgattgataagtcaaaaaaacggtggaaaacaaatctatcatttcttttatatcatttttatttgcatttcgaataaggtatcctaaattatttttttgatgcgcatatgtgttttttacattctgacattcttttattagaagttcttttcttgcaaaattgctgcaaacttttctatcgctgttaataaaatatgacatacaaaaagcatcgttacctttaaaatatccactaatcttcccttcggaattgaatccagcattaataaaagtttcaaaggattttgtgtcacaattacaaagaattttgcttaaatgttgttttgatgcaaagtgaattattctttttaagttttgcgttgatatagtattaaagtcaattatttttattcgcttattaggtaaatctactaatattttagtccgatctatttttgcgtaaaaagtattatttaattcacatctactagctctcattaaattgctttctccttttatcataatgtattacttgaagttaggaaaaagtttcttaactataagatatttttccaacctcaaaagtttgtcctaagtttaagtttataattataaaaaaacaataagctatagagaagtctctatagcttataaagcaataatatttataggcatacgtaaaaaatatcaaagtataccaaaacttctcttctacgcttacgagattagctgacggattcggattgaagaaaattaaccctacttattatcgtgtaataagattcaccccaaaaaatggttctcccgttcaaagtgattaagcgttacatatatcattttgtaattattaatatcttatatataaacatatcatttttaaatattcgagtcaatatatgtataagtcaatgtgtattattatgcaaatataagcattaattaatcaattatatattataaatgctcccttttactttattcgttaaagtgaaaaatttaattagcatgcttctatgcattcaactgtattttattaatccgttctaatgaataaattatattttatagaaatattattagatatagcaatactaaggagtttaatgtgcctagttttaaaaagtgtgatttatattatgcaggatttcctaattatttagtacaatatagaggtgattttcagggacaaattgataatatatcatatgcctgtggtgacaaaattactgatacaattgcggtaatttctatagcaccagaaaatttagaccgtttagaggaggatgtaccagcaatactatatattagtcctaggagcagatacgtactacaacaggtttctccatcaagtgtagataatatcaatgcaattaaaattaatccatacttagacttaaatggaagaggcgtgcttataggtatggttgacagcggaatagaatatttaaatgaagaatttataagagaagatgatacttcaagaatagtaagtatttgggatcagacggtaccagattctaccgacacatcagtttatattggaagaacatttagcaatgaagaaattactaatgcaatcaaagcttatagaaataatcaagatccatatctaattgtgccttcaagggacgaagtgggacatggaacacagatggctggtattattggtgcaagaggatataatgctgatgttcaaggcgttgcatcaggatgcgaatttgtaattgttaagctttttgaatcaattaattttagaaatgagcttcaggcaaatggtcttccttatacaccagtatataatgactcagaagttttagcagcggtatattatttacaaagtattgcagtaagaatgaatagacccatggttatatatcttggggttggtacaaccgaagggagtcatgatggtaataatctgctttctagatatttaacttctattggaaaacttagaggcattgttactgttactggtgttggaaatgaaggggcatcagaaggtcatacttctggaatcataaaacaaactggagatgtggcttctattgaattgagaatacctagggagatgaaatatttttcttttacaatctggttgataaaacctaatagagcatctataaatgtgatttcacctaatggagaatcatcaaaatttattaaagccaaggcaaatgaaatacaaaatgtgaattttgtattttttagaactcaaatgactgtaagatattatgttcctgagcatttcactggccatgaggccatatcaattagctttgatagcataaaagcaggaatatggacctttcagctaaggggggattatataacagatggtaggtatcatatatggttaccgccacaaaaaacattgccagaaaatacaagatttcttcaagcagatccatttaccacattgacaataccatctacggctcgaagtgtagtcacagcagcctactatggaaatgacaatgctttagttgcagcatcaggaaagggtcctaatgtaaatacatatgtagaaaacccggatatagctactttgggtgcagatatattagcaacaaatataggaggcaagactactactgtttctgggagttcagtagctgctgctataatagcaggcgcttgtgcacttttattgcaatgggggattgtcaatggaaatgatagaactatgtttgcagcaaaagtcatagcgtatttagttctaggtgcagataggagtaatttagcttatagatatccaactagagaaattggatatggttttttcgatttactaggcacttttaatataattagtagaagctatagaatggatttagatatagaaaatagatcaagggcggattggaaaataggggataattatattgaatataatgtaaaagcattatttataagaattcctaaatagatataaatgttaaaaaaacaatacttttgtttaaggttgtatattaaaataaaaaatatgtaatataaagaaaaaaattctattttaccaactaaaaggtactataaatggtactgaatattgtattatatagtgaacagcattgtttggtgctaatacaacaatttagggggatataatatgaatagaaatattaaaagaatagttgcattaacaattgcggcaactgcctttagtgcaattgtaccagcaacaagcttaactttaactacaacagcttatgcgtcaacaggtgatttatcaagtattaaattaaaaacatcaagtggaagcacaataaagacttatagtgaggatgactataaaagtaaaaatgaagttgatgatgatgagttgaaaaataatgaaacgtattatgctaagacttcatctagtaaaataaaaataagtgtaaatggtgctgactcaagtaaagttagaatctttaaaggaagaacaagttctactaaaggtgtaaaaacaggcagcactattgaattatctaaaggatcaacaacagttcttacaataagaacatatagcactgatccaggaacggttaaatacagtgatgattcatattctagtcaatacactattagagtgaaatgtacagcaagttcttctagtgatgatgatgatgataataaagatgtgtatttgaagagcatttcacttagtgagggaaatttaagtttttctaaaaatacttctgattatagtgtaaatgtctctggatctgttgatgaaattaaaataactgcaaagccagattgtgatagtgatgagtatgacgattatgaagtaaaaatagatggaagtactgttgatgaaagtgacaaatttagaaaaacaatatctttaaataaaggaaagaatgatataaagataaccgttaaaaatgatggggataagagaacatacacattgaacatttatagaggtggaagtggcaataactctaatagtagtgatacactattgccaactaagaatattaagataaatcaatgggtacaggtcaatggaagatggcaatacaacgattctatggggaatacagtaaagaataattggataagtaattactacttacaatcagatggaaacatggccacagggtggttgaactatggaggtatatggtattatttgggtgatgacggagcaaaaaaagcaggatggcagttagttaatggtaattggtactatatggattcagaaggaagaatgcaaacaggatggattaaggatgtgtctggaaagtattattacttatatagtaatggagctatggcatacaataccgctattggtgggtatagattaggatctaatggtgcttggattaagtagaattcataaaatgcttaatgtaaagtttttatttagaaatagtgataatctagctgattaacatatataaataaactaactataatctatacttatgcgtataactcaccgaaatgaataacatacttttgttacagtttctgggcaattctgatgggtgattctaaggctataaagttgcatccaaagtgctagcctcaaagaacaagctttgaactagcacatttggaacaacttatagccaaagaatcacatccatcaaaattaccaatgaaacattccacaaaagtatattactcatttctgattggaagatatttcatagtctaagtatagtctatgattgtcttatctatacttttaataaatttataacccataccaatatttatgaatattggtatgggtcgcatttttataaatagggcaaggccatttaatcatatttatattttcataatgaataatttgtgctttagctaaatactattaaatataagtaatactaaggagtttgctgtgcctagttttaagaaatgtagtttatattatggagagctgcctaattatttagttcaatatagaggagattttagaggtcaaatagacaaagtatcttatgcgtgcggagatgtaattactgatactatcgcggttatatctgcttcaccagaagatttagttagattggctaaggatgtaccatcgattctttatataaatcctagaagtaagtatgtattacaagatatatctccttcgagtgtagataatataaatgcaattaaaattaatccttatttagacttaaatgggagaggtgtacttgtaggcatggttgacactggaatagattatttaaatgaagaatttataagggaagatgatacttcaagaataataagcctttgggatcaaacgattcctgattctgatgatacttcagtttatataggaaaaacttttaataatgaagaaattactaatgcagtcaaagcttatagaaataaacaggatccatatttaattgtaccttcaagggatgaagttggacatggaactcaaatggctggtatcataggagcaagggggtataatgctgatgttcaaggaatagcttcgggatgcgagtttgtaattgtaaaactttatgagtccatggaatttagagaagagcttctggcgaatggaattccatatacaccagtatataataactcagaggttgtagcagcaatagattatttaaaaaatgtttcagtaagtcttaatagaccaatggtaatatatattggagttggaacaacagaaggtagtcatgatggtaataacttaatttcaaggtatatagcatctataggcagaatcaggggattgattacagttgctggtgtcgggaatgaaggcgcatctgaaggtcatgcttcgggaattataaaacaaacaggagatatagtttctattgaactaagaatatcaaaggaaatgaaatatttttcctttagaatttgggtaataaaacctaatagagcatctataaatgtaatttcaccaaatggagaatcatctaaatttatcaaagcaaaggctaatgaagtacaagatgttaattttgtattttttagaactcgaatgactgtgagatattatgttccggaatattttacaggccatgaagcaatagccataaattttgatagcataaaggctggaatatggacattgcagctacgaggagattatataactgatggaaggtatcatatttggctgcctcctcagaaaacattaccagagaatacaagatttcttcaagcagatccatttactacactaacaataccatctacagctagaggagtagccacaatagcttattatggaaatgataatgctttggtcgcagcatctggaaaaggtccaaatgttaatatagatataaataacccagatttagcgactttagggatggatgtattaactacaaaagtaggagggggaagtacaactgtttctggcagctcggtggctgcggcaataatttctggggcttgcgcacttttgttgcagtggggagttgttaatggaaatgacaaaaccatgttttcagcgaaagttatagcatatttgattttgggtgccgatagaagtaacgcgacatatagatatcctaatagagaaataggatatggattttttgatttacttggtacatttaatattattagccgaagttatagaatgaacttagatttaaaagaaaaggatgaagtcatcatggagaaaaactgtattgaatatagtgtaagaagtctatttataagacttccgaaaacaaatatggaaatataaaatatgaggatttaattaagaaaattttctttatatataataataataaagtctcatattagaactttcattatttcagaagattgtattacaaatttatttagagtttaacccaatatgtaattaaataattatcatgttgtaaattaactctagttatacttttcgcttttaagtaaatactattactgatctaaatttattagaataattttggatagtaaaaggaggtttacacatgacaaataaatttaaagaaaaatttgttgcaatgccaatagaaaagcatgatgcagcagcatgggctaatatggaagacgcgcaacctgtatctaatgtgaacattcctagcgaagtacaagttagaaatgcaaaagaatatgtagatacaaatcaaaagtaagatctatagtttaagattcagtcaaccgaaatgacaggtactctgttgcttcggttgctatagaatagagttgtgaatttctaacagcaaaagttgtacccatttacgcatgctccttagacgagctaaggacaagcgagaatggaacaacttttgctgaagaaattgctacgactctattctaaatgcaacgctgcacaaaagagtacctgccatttctggtgtggaatatattttaaactataaatgtaacttgaaattgaggtatttatagaaaaatccccggaaaatcggggattttttattttggttactatttacatgtattttatttggaacttttcttattaatattgcatatctgctaagcgcttataagtttcatatctttcttttgcattcttttctgcttcatcaaataatttatcagctacctctgggaatacgttcattaatgatgagtaacgtatttctccgtgtaagaagtctttatacggagcagatggttctttagattcaagtaagaatggatttttaccttcatcttttaataatgggttatatctatatagatgccaatatccagattcaacagctttcttttcttcttttatactgtttcccataccaacttttataccatggcttatacatggcgcataagcgataataattgatggtcctggatatttttcagcttcagcgattactttaagcgcatgattcatgttagcgcccatagctatttgagcaacatacacgtagccataactcatagccataagtcctaaatctttctttctagtctttttacccgcagcagcaaatttagcaacttgagcagtttgagttgattttgaagcctgacctccagtgttagaataaatttcagtatccattacaaatatgtttacatcatcacccatagcaagcacttggtcaactccaccataaccaatgtcgtaagcccagccgtctcctccaattatccagtgagatttcttaacaagataatcttttctttctaagatttcttttgtaagcccatttccaatttcatctccgcctagtacttctaaaactctggcagaagctgatttggaaccttccccatcgttaaagttgttaagccattcacggaatgcatctttaacatcatcgttaaagtctggtgattctaaaccttcattcatcaaatctgcaagtttttctctaatttgtttaacgccaaggaaaataccatatccaaattcagcattatcttcaaataatgaatttgcccatgcaggacctcttccttcagcgttagtagtataagcaatggaaggagaacttgctccccagatagatgaacatcctgttgcatttgcaattatcattctttctccgaaaagttgagttagaagtcttatatatggagtttctccacatcctggacaagcaccattaaattctagaagaggtctaactaattggctaccctttagagtatttctatcaattaaatcttccttaggagtaagtctcattgcgtattcccagttttcagcctgctctaatatttgttcctcagatggtttcattataagtgctttaccaggtgctggacatacatcggcacagttgccacatcctgtacagtcgagtggagcaacttgtattctgtatccgtaattttctagaccttttccggcagctttttttgtaatgaagtcttttggagcattttccttttcattttcatcaactaagaattgacgaatagttgcatgaggacatatgaatgcacattggccacattgtatacacttatctgtttgccattcaggcacattaacagctataccgcgtttttcataggctgtagttccaagagggaaagtaccatcttccatacctacaaatgcacttgtaggtaattcatcaccttcatgtcttgctagaggacgttgaatatttttaacaaagtctggttcgtctttaataggtttatcgctatcttcaacattggcccaagattcaggaatagtaatttcgtttaatgaatctattcctctatcaacagcatcatgattcattttaactattttatcaccttttttaccgtacaagtgtgaaattgagtcctttaaatatttaactgcatcttctacaggaataacatttgctagtttaaagaatgcagattgcattatcatatttattctatttccaagacctatttcaccagctatagcaattgcatctatagtgtaaaatttaatattattttttgctatatatctcttatatggtgctggtaatttatcttcaatttcatccttatcccatggacagttaagtacaaaaattccatttttctttaagccctttaatacatcaaaattataaatgaaggacttattatgacacgcaacataatctgcattataaactaaataaggagattttatagggctctttccgaatcttaagtgtgatacagtagtaccaccagattttttactatcataagaaaaatatgcttgagcatataagtcagtattatctcctatgattttaatagcactcttatttgctccaactgtaccatcagatcccaatccccagaatttgcagcttatagtgccttgtggtgtagtatcaattatttcgccttcagctaaagaagtattagttatatcatcaactattcctatagtaaagttatcttttggattatctgaattcaaattaccaaaaacagaaataatttgtgacggtcttgtatctttagatgccaaaccatatcttccaccaacaatcattggtttattatctttattatagaaaagcttagtaacgtctaagtataacggttcagcaggtgctccaggttcttttgttctgtctaatactgctattttcttaacagacttaggtaaaacgttaaagaagtacttatcacagaaaggtctgtataaatgaacctttatcatacctactttttcgcctttttctcttaagtagtctacaacttcacttatagtgtcacacactgaacctatggctactataactctttcagcttcaggatctccatagtaatcaaatgggtgatattctcttccagtgatattttttaattccttcatataattttctactatatcaggcactgcatcaaagaaaggattttgagcttctcttccttggaagtatatatcaggattttgagctgtacctctagcaactggatgttctggatttaaggctctatctctaaaggcttttaatgcagctttatctacgagttttgtcacttcgccaaaatcaggaacttcaattttttggtattcgtgtgatgttctaaagccatcaaagaaatgagtaaatggaactcttcctttaattgcacttaaatgggcaatgcaggctaaatccattacctcttgaacactgcttgatgcaagcatagcaaatccagtttgcctagttgccataacatcttggtgatctccgaaaattgatagtgcgtgagttgcaattgcacgagcagttacatgaaacactgcaggcaaaagttccccagccatcttatacatatttggtatcataagcagcaatccttgtgatgctgtatatgtagtagtcagtgcaccggcttgaagtgatccatgtactgcaccagctgcaccagcttcagattgcatttcagcgaccttaactggttgattaaacatatttttctttccgtgagcagaccattcatcaaccccctcggccataggtgtagaaggagttataggatatattgcagctacttcagtaaaattataggaagcgtatgctgcggcttggtttccgtccattgtttttgtgactttttgcattaggctaatcctcctcttctatttttatagaaaatcataatttatttatcccatttattatttgaaaactgaggaaaagtatacatatttctgataagccgtacatttagtgataatttatattaaattatggacatggaagatattaaatataaaattctataaacgaaatctttatacaatctttatacagaggaaaaaagtcttaatccaatctttatattattgctagtaatatttatatatgagatatgaatggcgaaaggagaaatatgttgatgctagattttatttttttgacatcattatttgtaggatttttttctatcataatgtttgctaattggtgtggaaaacaaactaacaagtaagaaaataaatgggggaatataaatgctaagtttagttgtaattataattttgctttttggatatttagggtatgcactatttaatccagagaaattttaaaattattagtagtggaactaggaggaatagttatggagtggttacaaataataataactttactactttttatgataatagtagtaccagttggaaaatatctgtattatgttagcactggtcataaaaacattggagacaagctatttgataaaatcgataactttatctataagatatgtggaataggtaaagatgatgaaatggattggaaagaatatattttttctattatagcagtgaatgctgcaatggtatttataggatatataatacttagatctcaaggattcttattttttaatccaaataaaataaatggaatggagcaaagtctgtcttttaatacaattataagttttatgactaatacaaatcttcaagattatagtggggaatcagggctttctcattttagccaaatgatagtgattatttttatgatgtttacatcagcagctacaggtttttcagcagctattgcttttatgagaggaataattggaagaaagggaatgggaaacttttttgttgatatgacaagagttacaacaagagttttattaccactatcaataatagtaggaattcttttggtaagtcaaggtgtaccacaaactttatctggaactaaaacagttactacaatagaaggtaaaatgcaagatatagcaataggccctgtagcagctcttgagtcaattaagcatataggaacaaatggaggtggcttctttggagcgaattctgctcacccatttgaaaatccaacgcctatatcaaatttaattgaaatactatctatgatggtacttccaggcgcattagtatatacctttggattaatgcttaggaataaaaaacaaggatggaccatatttggagcaatggctggaatatttataatagcgcttccaatatgttattatgcagaaaaggctggaaatccagtattagcgcatgtgggactaaatcaacttatggggaatatggaagggaaagaagtgagatttggagtaggacaatctgcattatttactacagtgactacgtcctttacaacaggaacagttaataatatgcatgattcattaacacctataggtggagcagttgctcttatgaatatgatgcttaatgttgtatttggaggtaagggcgtaggatttatgaatatgatgatgtatgctattcttactgtctttttatgtggacttatggttggaagaacaccagaatttttatcaaagaaaattgaaggaaaagaaattaagcttatagcattggctataataattcacccattactaatattgatgttttcagctttggcactaatatcgccagagggaattgcaggaatatccaattcaggatttcatggattgactcaaatagtttatcaatttacatcctcagcagcaaacaatggttctggatttgaagggttaggagataatactctgttttggaatgctgcgactggtatagtgatgttttatggaagatatttatcaattataattcttctttcagtagctggctctttagcaggcaaaagaacaattccaacaacaataggaacttttagaacagataatacaatgtttgcattgactctaattgcaattgttttaataattggagcattaacatttttacctgctttggcgcttggaccaatagcagagcatttaacattgtggaattgattattatgaagtggaaagcaaggagaaaaataatatgagtgataaaagaaaaaagtctaaatttattacaaaagatatattaagagaatcgattatagagtcctttaagaaattaaatcctaaatatatgataaagaatccagttatgtttgttgttgaagtgggatttgttataactttattacttacattttgtccaagcttatttggagataagggaagtaatttaagaatatataattttattgtagctctaatattgtttataacagtactttttgcaaattttgcggaagccgtagctgagggtagaggaaaggctcaagctgagaatttaaagaaaatgcgtaaagatactgtagcaaaactgttgaatcctgatggaacaactaaggttataaatgcaaatgaattaaaaaaaggagacgtagttttagtcgaaaatggagatataattcctaatgatggtgaagttgtagaaggaatagcctctgttgatgaatctgcaataactggtgagtcagcacctgttatgaaagaacgtggaggagattttgcatcagttacaggaggaacaaaggttgtaagtgactggctaaagattgagataacagcaacaccaggtgagtcatttttggataaaatgatatctcttgtagaaggagcatcaagacaaaaaactccgaatgaaattgcacttaatactgtacttgttagcttaacaattatatttcttatagttatagttgcactttatccaatggctaattactcaggtgtttcaatttatatttctactttaatagcacttcttgtttgtttaataccaacaacaattggaggtttattatcagctattgggattgcgggtatggatagagttactaaattcaatgttatagctatgtcaggaaaggctgtagaggcatgcggtgacattgatacaatgcttcttgataagacaggtactataacatttggtaataggttagcttcggattttataccagttggcaacatgaggaaattagatttaataaattattcagtaatctgttcaataaaagatgatacaccagaaggaaaatcaatagttgatcttgctagaagaagcgaagcaacaattaatgaagaagaatatagaaatttagattttattgagtttacagctcaaacaagaatgagcggagtggacttgcctgatggtactgctataagaaagggagcttctgattccataagaagcagaataaaagaaatgggtggaattattccagatgatttagatgaagctgttaacagagtatcgaaacttggaggaacacctcttgtagtttgtgtaaacaataaaatatatggagttatatatcttaaggatactgttaaaccaggtcttgctctcagatttcaaagacttagagaaatcggaattaaaacagttatgtgtactggtgataatccattgactgctgcaactattgcaaaagaagctggggtagatgaatttatagctgaatgcaaaccagaagataaaattgatgcaattaaaagagagcaagaacaaggtaaacttgtagcaatgactggcgatggaactaatgatgcaccagctctagcacaggcagatgtaggacttgccatgaatagcggaaccacagcagctaaagaagcagctaatatggtagatttagattcagatccaacaaaaattcttgaggtagttgaaataggaaaacaattattgattacaaggggggctttaactacttttagtattgctaacgatgtagcaaagtattttgctattatacctgccatatttacagtagctatacctgaaatgcagattatgaatataatgagactttcaacaccatacagtgctatactatcggctcttatatttaatgcaataataataccactacttattccagtagcaatgaaaggcgtaaaatataaaccgatgaaagcagagatgatgttgcttagaaatatgcttatttatggaggcggtggagtaattgttccattcataggaataaaggtaattgacatgattattactccgttagttagaattcttaatattggctaacttagatagtaaagattattagctaagaaaaaattatgcacctcaataagaaaaggagatttttatatgaaaataatcaaaaaatctattctgttaagtattacttttatggtactttgtgggcttatatatcctcttttaatgactggaataagccagttggtttttaatagaaaagctaatggaagtatgataactgttaatggaaatgaagttgggtcagaacttataggacaaaatttcacagatcaaaggttctttagaggaagaatttcatctgtaaattataacacttatacagaagcagatactgtgccagatgaaagcggaaaagtagcctatagtggagtagcatcaggatctcaaaatttagctccatcgaatgatgcacttaaagaaagggttcaaaaagatatagatgattttttagcagctaatcctggagttaaaaaagaagatattcctacagatttgcttacaagttcgggttcaggattagatcctgatataagtccagagtcagcaagaattcaaataccgtcagtttcaaaggcatcaggaataggtgaagcagatcttcaaaaaatagttgataaatatactgaaggtagaacacttgggatatttggtgaaccaagagtaaatattctaaaagtcaatatggaaatagcttcacttttaaatataaagtaatttgggattctagttcattttacttttatagaatgagggggattactatgaaaagagtatttttagggcttttagctattgtcataatcatttccatagcgggttgtaataataataataataataataataatccatatgctggagaatataaaacatctgataatactattttagagcttaattcgaatggtaaatgcaaggtaataaacaattcttataaggatgtattttatacgtatggtaagtatactataaatgataataaaatagaaataacttttgatgaggataaacaaaactatatgagagttaaatctttaagtggagaagttaaaggaagtaatatagaattttatgattacttaggaaaagagtctacttattctaaagtagagtagtgaaagtacttttatattattattataggatatataatttcattaggcagaaggcgcaatcaaagaaataataaaacagtatgtcttactattagtttctttcatgtgcctaagataaaattaaagaaatgttaggagtgatttaaatagatataaatgaaaggccagatccacagtatcttttaaatcaaataaaaaaagaagaaaatgagccttcaaaaggaaaattaaaaatattttttggttatgctgctggggttggcaagagttatgcaatgcttatggaagcgcatgatatgaagaaattgggctacgatgtagtaataggctatatagagccacatgcaaggccagaaactatggcattactaaatgggcttgagagtatagaaaataaaattattgagtataaggggataaccttaaaagagtttgatctggatatggctcttattagaaaacctgaaattatgctagtagacgaactggctcataccaatgctagtgagcaaagacacagaaagagatggcaggatattgaggaacttttagaggcaggaataaatgtttatacgactctaaatgttcagcatatagaaagcttaaatgatatagttgaaagtataacccatatttcagttagagaaagaattccagacaaaatatttgatgaggctgataaagtagaattaattgatattgagccagatgaacttttgaaaagatttagtgatggaaaagtgtatgataaggaacaaacgacaaaagcatttaataacttttttactaaaaataatttgtttgcacttagagaaattgcattaagaagaactgctgatagagtaaattatgaagtggaaagtgtaaggttgtcaaaagggcaaataaccgtaatgccaacagtcgacgcaatattagcctgcatttcttcatcaccttcttcttcaagagttataagaacagcaagaagaatggcagaagcacatcattcaaaatggatagcattttatgtggaaacaacaaagtcgaaaaatttaaataaaaaagataaagagagtttaagtgcgaattttaagctggcagaagaattggggggagagatagtaactgtatatagtgatgatatagttgaacaaataattcaatatgcaaaatttagaaatgttacaaagattataataggaaaaaatcataaaaaaccaaataatttttttcatatttatgctagagatatagttgataaattgatggagtctaactcatatatagacgtttatgttataccgaattcagcttttaataaagaaaaagaaaacattgtaaaaagaaaaaaagtaagggtcagtatttcatggaaagaaattttaacagctactttaataatgattatatctacaatgatttcattattcatagactacataggatttcgtgaagcaaatgtcatcatgatttttattctgggtgtaatcatagtaaatatgaaaactagagggtatcttttaggatttatatgttcaatcataagtatatttttatttaattttctttttacagatccaagatattctcttgaagtttatgataaaagctacttagtaacttttccaataatgttaatagtgacatttacaattggtactctcacaagcaagatacaaagggaagcacaaaattctttggcaagagagaatacaacacaaattttatatagagtaagtagaaagttactaagtgcaacaggtacagcagatgttgtagggatagggataaaatatttatctagattattagaaagaacagttatttgttacttagttcaagaaaataaattaacaacaccttttatttatacggctactaaaggtgagaaagatcggacattactaaataaagaggaagaagctgttgcatattggacgttattaaatgataaggagtcaggtgcaggcactaatactttttatggagcgaagggatattatgtgcctctgaaaagtcataacaaggtattaggcgtattaggtgtatcttgtattactggaaacttaaaaccagaacaaaaattcattttcgagactgtagctagccaaatatatattgctttagatagagagattctcgctgaaactcagaagaattcgaagttagaaatcgaaagtgagagattaagaagtaatcttttaagatcaatttctcatgatttaagaagcccacttgcagggataaaaggagcaataagtactatcattgaaacaggagaacttctatctaaagatactaaagatgaactttttcaaggtatttatgatgatactgaatggcttataagattggtagaaaatttactcagcatgactaggttcgaaggcggaaacatgaaaattaaaaagaaccttgaactcgtagaagaagttgtatatgaagcagttcaaagaacttcaaaacgtttgaaggatcatgagataaaggtgacagttccagaagatgttataatgctatctatggatggaaatttaattgagcaagttcttataaatctttttgataatgctgttaaatttactcctaaggaagctttaattgaggttaaagtatatgaggaagtaggcgatgttatatttgaggtaatagatgatgggataggaatatcagaagaaatattaccacatatatttgatagattttttacaaatggagataaaatatctgattcaagaagaggcgttgggcttgggctcgcaatttgtaaatctatagttgaaggacatggtgggaaaatcagcgctcagaacaaagataaaggaggcgcaatttttagatttaacattccaaaggagggaaaggtagatggataataagccatatattcttgtagtggaagatgacaggcccataagaaatttcataacagcatcattaaaagcacaaggatttaattatatagaaacagagaaaggaattgaagctattgcactttctatgtctcataaaccagacttgataatattagatttagggcttccagatattgatggaatcaatgtaattacaaaagtaagagagtggtctaaaatacctataataatagtttcagcaagagaaaatgaaagacagaaaatagaggccttagacaaaggagcagatgattatttgacgaagccttttggaattggagaattattagcaaggattagagtgtctttaaggcacagtgtaacaaatacatctgaaaataaaaatacagaaatatttaaggttaagggattagttgttgattttaataaaagaaaagttagtatagatgacgaggatatacatttaacccctatagaatataaaataatggcactgctttgtaaatatgcaggaaaagtattaacccataatttcataattaatgaaatttggggtgcagctttaggtaatgaaactcaatcacttagggtttttatggcaagccttagaaggaaaatagagaagaatccagcacagccacaatatatttatacagaagttggtgttggatacaggctgatagatgattagttattaagataaaagcttatcctaattttttaaggagaggcttttttttaacagctttaatttgtgaagatagttctgttataattaagaatatttcattccagttagtaactctagttattttatcatttaaaggtttcctgttataatttgtatccataagaagaacgttgaaccctgcctctgataactgaattgcattattgtagttatcttcaataaaaacattacaatctaattcgcgtgctttgtcaaccttgtagtggctacctaaaacaaataagttatcataaggtatttcattgtttcttaaaaatagatgagtcagtgtttttagttctaaatctctagctgtcacaaaatatatattatgaaattgatgtaatgcagttataacaagtttagcatcatctcttagtttttgatctgagtggagtttgaacttatttttattatagaaatcatcatattcctgccttttcacacccatgacttcgtgaatttcgtattctattacctgatcttcggttatattcttatcaaaatatttattcgccatatctagccagtcataagcattggttatcgttccgtcaatatcaatacagatgtttaaagtattcattatatttacatctcctttattaattattaatattaaaaaacttccacaaggttattcttaattgaggaagcaaagaatgattaaattctttatagatatagtatatttataaaaagctaagataccattaaaggtatgttaatgttttgttacttttatgaataatagaataatgttagtttatcatagtgataaatagaatgtttttaacgttcttttaaagttttacgtgcagaaatttaacaattttgttgtatgatagaaataaatagatttagaaaggttgtatttaaagcaatttactaatttaatgcttatattaaatataatttatacggcattatggtgaaaaattagaaatgtgatgtataattacagtaagagataaataaattttaagtacagcgttttatagaataaataatgtgatttcaatactatacaaagcaattaatgtgtataaacttaatatatttaccattgactttatgtaatgatgaaatttgatttcaaaaataaaaaggatggtgggataatatgactccaaaagaactaactcaaaaaacagttaaggatataattaaaagaagaaagaaagctgaaaatgagattaaggcttatcaaagtgaccaaactgcaaagaaaatgaggaactggagtgttagagttggaggaagtagatggtaatgatttaaatatagatcgaaaatatagattatataatatggagttaccaacaaaaggtgactctatttgttatatatcttgtaatttatatactatttaaaataagtaccttcttttgttagttatgtcatcattagtgttgaaagatatggagtaaaagttaaaagtggaaaatagtaatattgtgctattgaagcatagaacccagtaggttttgtatagtatcatgatttaaagtatataattttagtaaagataagtatttagagtaataattttgggtttaagttttaattgggaagttgtaggtttgaacaatcatataatttttagagggtagctttacataattatactttaaggtaagaaacaaatttaaaaataagattgtttatgagaagtgaagaaatacattggaattaaaagtaaaagtaatttctataaaataaagttacaactgtcaattttaaattataaatataagatttaaaggagagggaaagaatgtcagtaagggttaagtttataagtgaagtagaagttaaagatgagaaaaaggttttaaaagctgctaaaaatgctagggtaaaaattaatgattcatgtgaaggaaaaggaaaatgtggaaagtgtgttattaaagttatagagggaaaactttctgaaccaactaaagaagaattaaaagttttaggaaaagaaaaaattgatggcggttatagattggcatgtcaaactcgtatacttgaggattcagtgatagaaataatagatagcgaagatataaaagctaaaaaagatactaagtgcggtaacttaaaagttaaggatagtgataaaataaaactacgcaaagaagatatcgatgctaatgataaaatagaagattctgaaaccaaagaggtgaaaattaagatagatagtgatgataataagttgaaccataagggacataacaaagatacggcaaaaaagaataaaaaatcagataaatagaatataaagtacataaacaaaaaatatagtcaaattaataagaatagattagtgaataatatttattttaaaataaggcttagaaatgttattgaattacatttctaaaccttattatttttagttaggatatatttcatagcctaagtatacctcaccgaaattataaatattttgattccgaaaagctatgaaaatatcgctgaaggttctaagcagcaggttgtatccactttagcatgctccaactttcctagggaagctcgactcattacattcgctgaggaagttcgagaacccaaaataaaattttggactctcacttcacaagctaaaatggaacaacctacagctaagaacctttaacagctcattttcaaatgttttcttcacaaatatatttatgatttctagtgaagatatgaacttaaagttttagtaaatttgtaaatacattcatctaataagttgaattcttaaattcgatatctatatagatttcacaaacaagaacttgacatatacattaagctaactcaagtaaatttaagaactaatccaatgtataagtaaaattcttgaattggttatctatataaaatcagtaagaatagaggtatttttaacatgctttttacacggaaacaagttttaattaataatcgggtattacacttaataatgtaaataaatagactttaaaggataggtgaaagaatgtatactagaaatttactgtcttataattataagtctaatatagatagcatagttataagaaaaattaatctaataaaaatgctttttctcctgttattgttaattatttttttgacaagtatagtaaggttctataatttttttgagtgtgtaaatagtagcagcttcccagttgatgactttaaaactgatattagtatgcttagtgaagcggtaaatattattgagacggaaagaacatcaaatgataatcttcaaataaataattttggatctgatggcaaaatagttgatgctagtgaaattagaacagacttagcggctgctttaattaaaatcggagatatggataacgataaaaagttatcagatgaggaaattacagaacttggggttatgaaattggatacgaaagttattcaaaaagaacttagggaatttcaatttaatttaagatcatcagaccataatctgaaaaattttattgttataacgaagggaaaatatgcaggaacaatactttataatggacctttaaaatttattgatgatgaacataagcgttattttggattagaattatggatggatgctaaatgattttcaaattttaaagtaatttgagagcgatgtagttgtattatttaaaaattaacatcaaatttaaatattattaaattcgacatatatatttaataagtttattatataagatataataaatgataaatttatctttgtgtaagcgtaggagaaatatatggagaattatgtggattttattaataaagcttggaaagactttatttctacaggaaatgtaaatcctaaggttagaagtgaaattggtgattcgtggataagatgcatgaactatggtgttgatccatatgatggtaagggtcatgttaaacattctaatataaatgaattaattaataaaaataatgaacttatatctgtagctagacctgttatggaaagtatttatagcatggttagaggatcaggatttgcattatttttaacggataaagatggatatataatagacgtaataggcgataacgatataatgaagagaattgaggaattaaacttccttaagggtgaattatggtcagaaaatgtagttggaactaatgccatagggacggcattataccttggtaaaccagtgcagactataggagcagaacattatggggtaaatcaacactcgtggacttgttctgcatctcctatttatgatgaagatgataatctaattggatgtataaatatgtctggaaattattataatgcacattctcatacgttaggaattgtaactgctgcggcacaatcaatacagaagcaaatggcacttgctatttcgtataagttacttaatgtgacatttgattccatatcagaaggcatgatagttattaatgagtatatgaaagttaaaagaataaacggacgagctttgaaaattctaaatatatcactagaagaagcaatgaatatgaatattaatgaagtactaaatggcgtagattttcaaaaattattgcaagaaaaaaataaatctttaaataatatagaatgggatttttctataaataatgacataataaaatgtgttataaacgtattaccattaaataaaaatggtaaaagtagtggtatggtaataacttttacagaagttaagattgtacataaactagtaaataagtttgtgggatataaagcacaatatgaattcaaagacattataacaacaagcaaagaaatggccaatatgatagccttcgctaaaaaagcttcaaaaagtgattgcaatatactaatacagggagaaagcggtactggtaaagagttgatttctcagtcaatacacaattatagcgatagggctagaggtccgtttgtcgctgtaaattgtgcatcaatacctagcgaattagttgaaagtgaattatttggatatgaaaagggggcttttactggagcatcaaaagaaggtcatccaggtaagtttgaattagcagatggggggacaattttccttgatgaaattggtgagctgccattagatattcaaagtaagcttcttagggttttagataatggaaagatagttagagtcggtgggacttatgagaagcagctaaatgttagagttattggtgccactaatagaatattgaaaaatgagataagaaagaaaaattttagagaggatctatattataggttaagtgtaatggagataaagactattccattaagagagcgaaaagatgatatagatgtacttgtaaatgattttgttcaaagattaaacataaaaaacaaaaataagattataactgtaagtaaggaatatattgataagttaaagaaatatgattgggacggaaatataagagaacttaagaatgttgttgagcgagattattacttaagcgaagatgaaataatgaatatagatataaataatttagattataataatatgacacaaactttgcatgatgaacctctaaaccaagaggagattaaaatagttcctcttgatgcattagaagagaatgctataagggatgctataaaaaaatgtgatggaaatcttcagctaacatctaaattgttaagtataggaagagcaactttatatagaaagataaaaaaatatcatatagatgtatcaaaatgagaaaagaaaaatctatgtatcaaaatgagaaaataaaatgtatcgttttgatacatttttcttttatagttaaatggtttttatataaaattgtattataaataatagataaaataaaattatatcaagaaaacaacctaaataacgcaaaaaaatataatcttaatcataacttggcacagaaattgcttaataaaatatatgtgaattaattaacaatttatccaaggaggagttttaagatgaaagcagcattatggtatgcaaagaaagacgttagagtagaggaaattgaagaacctaaagttacagttaatggtgtaaagattaaagtaaaatggtgtggaatatgtggatcagatttacatgaatatttaggaggacctatatttataccagtaggacaacctcacccattaagtggtacaacagctccagtagttttaggacatgaattttcaggagatgtcgttgaagttggtcctaatgtaaagaattttaaaccaggagatagagtaatagttgaacctatagttgcatgtggaaaatgtccagcatgtttagaaggaaaatataatttatgttcatcattaggtttccatggactttgcggaagtggtggaggacttgctgaatatacagttttcccagaagaatttgtacataagattccagatgaaatgtcttacgaacaagctgctttagttgagccaatggcagtagcattacattcaattagaattggtaattttagaacaggggatactgcgttagtactaggatctggtccaataggactagcaactattgagtgcttaaaagcagctggtgcaaaattaataatagtattacaaagaaaatctataagacaagagtatgctaaaagagcaggggcagatgtagtattagatcctaatgaagtaaatatagcagaggaagttaagaagcttactaacggattaggcgttgacgtggcgtttgaaactacaggagctcaaataggttttgatacaggtatagatagcttaaagtttgaaggaactttagttgtaactagcatatgggaaaatgatgttaaatttaatcctaatgtattagtatttactgagaagaaaatcattggaacattagcatacagacatgaattcccagcaactatggctcaaatgaaagatggaagaataaaagcagaaggatatgtaacaaagaaaatacatttagatgatatagttgaagaagggtttggagcattaacaggtccagaaaagaagaaacatgttaagatattagtatctccagacaaagaacttgtatctaaatcttaatctatatagaatttgcaattagcaataaagatgttaagtagtacttatagataaagtatattctcgcaagaacaaaaattatgctaagattcagatgaagagaaaaatcatctgaatcaagtttacttggttaaattaggaggaacgtaaatgtataaaatagtgaacaaaaaggagctaacaaacaatatattctcaatggatatagaagctccaagagtagcaaaatctgcaaagcctggacaatttattatcataaaaaatgatgaaaaaggtgaaagaatacctttgactatagcagattatgatcaggaaaaaggaacagtaactatagtttttcaaactgtaggaaaaggaacaaaacagttagctgcttttaatgaaggggatcatgtagctgactttgttggaccattaggtgtaccaagtgaatttatacatgaggatatagaagaattaaagaaaaagaatttcatctttgtagcaggtggagttggtgcagcaccagtttacccacaagtaaaatggatgcatgaacatggaatagctgtagatgttattttaggaagcagaaacaaagatttattaatatatgaagaaaaattaaagaatgctgctggaaatctttacgtaacaactgatgatggttcatatgaattcaagggaactgggtcagatatgcttaaagagctagttaataatcaaggtaagaaatatgatcatgcaattattattggaccaatgataatgatgaaatttacttctatgctaactaaggaattaggaattccaacaacagtaagcttaaacccaataatggttgatggtacaggtatgtgtggtgcttgtagagttactgttggaggagaagttaagtttgcttgtgttgatggaccagaatttgatggacatttagtaaattacgatgaatcaatgagaagacaagctatgtataaaacagaagaaggaaaagcacagttagaagttgaagaaggaaatactcatagtcacggtggctgtggttgcagaggtgataaataatggacatgaatgagagattagttagaataccagtaagagaacaagatccaaaggttagagcagcaaactttgaagaagtttgtattggatataacgaagaagaagcaactaaagaagcttctagatgcttaaactgtaagaatcctaaatgtgtagaaggatgtccagtatcaatcaatataccaggattcatttcttatgttaaagatgaaaaatttgaagaagcggcaaaagaaatttcaaaatacagctcacttccagcagtttgtggaagagtatgtccacaagaaaagcaatgtgaaggaagatgtgttttaggaataaaaggtgactcagtgtctattggtaaacttgaaagatttacagcagactgggcagcatcacataatgttgacttaagtgcaacagaacctaaaaatggaattaaagttgcagttataggaagtggacctgcaggacttacttgtgctggagatttagctaaaaagggatatgaagtaactatctttgaagcacttcataaagcaggcggagttttagaatatggaattccagaattcagacttccaaaagaaaaagtagttaaaaatgaagttgaaaacattaagaagcttggtgttaaaatagaaactaatgttatagttggcagaactataactatagatcaattatttgaagatgaaggattcaaagctgtatttataggttcaggtgcaggacttccaagattcatgggaataccaggggaaaatgcaaatggagtatgctcagcaaatgaatttttaacaagagtaaacttaatgaaagcagcagtagaaggatacgacactccagttagatctggtaaaaaagttgcagtagtaggtggaggaaatgttgctatggacgcagcaagaactgccttaagacttggatctgaaagccatatcgtttatagaagaggtgaatcagaacttccagcaagagtagaagaagtacatcatgctaaggaagaaggagtaatctttgacgtattaactaatccaacagaaatcttagtagatgaaaatggatgggttaaaggaatgaaatgtgtaagaatggaacttggagaaccagatgcatcaggaagaagaagtccagttgaagttcctggttcagaatttgttatggatgtagacactgtaataatgtcacttggaacatcaccaaatccattaatttcatcaacaactcaaggattagaaataaataagagaaggtgtatcgtagctgaagaagaaacaggtcttactactaaagaagcagtttatgctggtggagatgcagttacaggagcagcaacagtaatacttgctatgggggctggtaaaaaagcagcaaaagctatagatgagtatttacaaggaaaataaatataaacataaaataaatataatttttatgattaaatcctaaattataaagccttggcaatattaaatgaatattgtcaaggtatttttattatttaaggattcataatgaatatgaattaaaacctgtgttcagatagaaggcggttttatagttaagaaatttgtgctaagggagtataatagatatatatttagatatagtaaggagataaaaatggaaaatatgttagttaaagaatattatgattggtttagttcttatgtaaaaaaattttatggtgaagatagtttaataaatcagaatattgagcttaaggaaatacatacattaaaagttgcagagcatgctgtaaatatagcaaaatctttaaatttgacccaagaagaagttgatacagcagagataataggattatttcatgatataggaaggtttgaacaattcaaaaaatataagacatttagggatgttttttcagaaaatcatgctgctttaggtgttaaaatattagaagaaaacggaatattaaaaaacttagatgatagtagaagaaggattattattaaagctgtaaatcttcataatgaaaaagatcttccaatggatttaaataaggaagaatcattgttttgcaaattgattagagatgccgataaacttgatattttcagaattattatgggatatgagagagaaagaaagaatcatcctaatccggcgcttgataatttacctgttacatcaggctacaattcagagtttattaaagatattcgttcaaataaaaaaattagtaataattcactaaaaaattataatgatagaaaaatatatgaattaagttggataattgatttgaatttttcattttctcttaactatataaaggagaaggaagttttaaaaacattaattagctgtttacctaaaaatgaagagattgatgatttagaaaggtaccttgataaatatatagaaaattccatagtgaaataatttacctataaaatgaacaatttaattgctttctgtttgataataatattcaatttatggctatactagctaacctgattctattaataaaatgctaaatgatattatgtttaatatataagtctataagtatgataatgtctatagaatttagtggcatataatatgtagatataatgacgaataatacttatgttatttggaaaattaactttatgtaatctttaattgtaaaatacatttttatagcaaaccatatgatgtaattgtcttatagtagagtacatgaaagtaaactactttaattaagagtatgttttgcataaatttatttaagaatgataattattaagatggcattgaaaaatagtatagtcaggggtggaaagtatggaaaacagttataataatttaaaaatagcagaacgtggagctagagtgagtattatagcgtatataacattatcattattaaaactcggagttggcttttttgctcaatctaaggcattattagctgacggaattaataatactaccgatataatagcttcagtggcagttttaattggattaaagatatcaagaaagccagctgatgatgatcatccttatggtcatcttagagcagaaacaatagcatcattaatagcatctttaattatgatagctgttggtcttgatgtactttataatgcgattaaatcagttatcttttttaaccctaaggctcctgatttagtatctgctgtagtggcaattttttgcgctgctgctatttatattgtatatcgttataatatgagaattgctgttaagataaaaagctctgggctaatggctgctgcaaaagataatctttctgatgcatgggtaagtattggtacgaccataggtattgttgcttctcagtttggtttcccttggatagatcctcttgcagctgtagttgtaagtgctttaatactaaagacaggatgggatatatttagggaggcaactcataatctatcagatggttttagcagagagaagcttgatggtataactaaatctattagccaagttcctggggttaaacaaattaagaatataagagcgcgcgttcatggaaataatattttacttgatttggtagttggggttagttccgaattgtctttagttgaaggacattcaattactgaaaaaatagaagataaattgaaaaaagatctagatataacgcaagtaatggtccatgtcgaaccggataagtagaaagtataaatgtagttgaggaaaagtaaaattcttcagctacatttttattttgaattaattaagttgtaaaagcagagtgaaccaatttcatatcgagcgaataatataatatgtagaattttactaatgaatataaagagataagcataaagcaggtgtttaaatggatactaatcgaattatatttaatataaaacgaggatattgcagatatattggttctggttcttgcagagaagtatttgatcttggcaatggatatgtagtaaaaatagcaaagaatgcagctggaattgcacaaaataaaacagagtattatatttctcgttatgacaattctaacttatttgcaaaggttgtagatgtttcaaaaaactttgagttcctaattatggagagagcagataagatatataatattacggaaatatggagatgttttaatgttaaaagtaaaaaagaaatgtttaatttaaaacagataaaaactatttctaaaaattataatttactattaagcgatttgaatagacaaagtagttggggcgtaattaatggtagaccagtgattattgattatggatttaccagagaagtaagggaaaaatattattaaattttttactaaagcaggattgagtatatcatatcctgctaaaatattagattactaaaattcaaggcaaagacggcttaaatttcctaattcatactctcgaaaaataactctaggaattaatagagaactgctgcctaatgctataaatagtggaacaaaatgctcagggcttggaacagccaaatcagcatttggagcttgatctctataattgtaaagtgaattaaaatcattttcttttaacctgttaattagccagtcatcaaattcttcagcccaagcatcactgcttacagcctcaaaatcaactaaatttagattatgaactgtatttccactcccgataactaaaatatcttcgtcacctaaagtttttagagcgctacctatttttatttgttcttcaatggataagttcgagtctattgaaacttgaacaacggggatgtttgcttctggataaagatgctttaaaagagtccaagctccgtgatctaaacccctatttaagtcttttttcacttttatgccttcgtgtgagagcttttcttcgacttttgctgcaacggtactagaaccttgcgcctcatattttacattgtaaagttcgtctggaaatccataaaaatcatatactgtttcgtatgtggaatcagaagacgatatagttagtgtctcactatcccagtgtgctgtaaagataacaatagctttgggatttaatttctttccaaggttatttagaaattcagtataattatcttcttcaatggccatcattggagagccgtgtgctaaaaataaaggtttaaccatataataaaatcctcctttagatttaataattaattaatattagatattaccataaagatcaaagttaatacataagttttacggaatattgacttattcaatgaatattattatatttagtataatatcataagttgcttatctcaattaagtcattatgatagaatagtaacaggtggtgattaaatatggaaaaatttcatatgtgcccaaggtttgaaaatgcttttgaattactaggaaaaagatggaccggattgattataagaacattattgaatggacaaaatcgattttcagatatagaagaagctattcctaatatgagtgctcgtatgcttactgaacgatttaaggagctggaaaaggaaggaataattattagaaaagtttatccggaaactccagtacgcatagaatatgaattgacagaaaaaggccgtgatcttcaaagtgccatggatgagattcaaaaatgggcagaaaaatggaattaactaagacaattcaaaaaatataaagaattttcttaattacaatggagattctttatattttttattgtttgaaaattaaaaaaattatgaatttatattttaaatactattgactaagtgttataagtatgtaataattaatctaaagttacttactaaatgtaagtaactaattaaaaatattgagacgaatttactaggcttcactgttttttatataaaagatatactagttatagttagatataattttaaattactataagtaattatttaaaaagaaaaaaatataaatacttaaataaatttagatatgataggaggaatgattatatgtcaaaagatttttttactgctgtagcagatagacgttcattttatggaattagtaaagaaaaggtggtttctgatgatagaatcagggaaattatagaacatgctataaagcatacaccatcatcattcaattcacaaagtgcaagagtagtgctattgttaggagatcatcatgatagattatgggatatcacagagaatgctttaagaaagattgttcctgaagataaatttgagccaactcaagaaaaaataaattcatttagaagtggttacggtacagttttattttttgaagataatagtgtaatagaatctcttcaacaacaattttcactttataaagataatttcccaatttggtcacaacaagcaagtggaatgcaccagtttgttatttggactgcattagaaattgaaggatttggagcatcgcttcaacattataatgagcttattgaaaatgacataaagaaagaatggggaatatctgatgattggaaacttattggacaaatgccttttggaaaaccaacagcggaacctggcccaaaagaatttaaaccattagaagaacgtatcaagatatttaaataaagaaatatttcaatgattattttcatataataggggtgattttatcacccctaaaaattatttgattgattctaaatttatttaaaatcagaaaataatgagattatgatttaaatgaataattctttttattttagataagagtatttttagctggaaaggctgagatatcaataaaataaagatgttttagatttgattatgatgattttaaagatataattggtattatacttagcattaattatatttatatagttgacaattaacaatatgtaacttataataaacaagcaaataaaaatttattacctatattggtaatagtttaatatttaaagattagaagtgaaattttaattttttaaaggtaaatctggtgaacgtagttcagttggtagagcgccagtttgtggcactggttgtcgtgggttcgagtcccatcgttcaccccatactgggatgtcgccaagtggtaaggcaatggattctgactccattattcgcaggttcgaatcctgtcatcctagccaatttttggttcactagctcagtcggtagagcacatgacttttaatcatggtgtcccgggttcgattcccgggtgagccaccaattatataatagaaatttaatattttagattgaacttagcattaatatgctaggttattttttttattctctaaaaattcatacttgattcaaatctgcaaatactgtgttaattgtagtataaattatgaaaaagactggttttgaagattgccttttaaaaataaataccatactagaaaggagaaacatttttatgcagcaggcattgaaaataagctgttaaaagctcttaattgtaggttgtttcattaatgcttgtcacaatgaagttgagagcaagcattaatggtgtaacctgcaatttagcactttcagcgaaattttaatagtcctgtgaaataacaatgtttctcctttcggatgtttatttcataagtctaagttatctttgaaatattatgtttaagcacttttgcgtttctttgaacgaatagtccagatgattagtcctatgaagaacccgtaaagtgctggtattatccatccaaatccataatcaaaaccaggtaaatatgagtgagcaaaattcacaagttgcttaacgattaaattctcttgtagaggctgaggcaatgatttacataaatcaaaaaatgctgcaataactgtgaatcctgttgtccatctataaacgtcgctttgtttattaatgaaaggcgctaatagagatagtaggattaaagtaattactaaaggatataaaaacataagtactggtatagataattgaataatattacttaatccaaagttagcgattatgaaagagaaaactgtaaataaaacagcatattttttgtaagaaacagagtttggaaacatttcgctgaacatttcagaacaagaagttatcaaaccaatagctgtttttatacatgcgattccaacaataaaagctaataatatttgtccagtaaaaccaaagtaatgattgcttaccatagataatatacttccaccattatcagcacgattaacgcttcctagacttgtagcacccatataagctagagatccatagataatagtcattcctataacgctaacaagtcctgatttacatgtctctatagcaattgattgagggtttttaactcctagtttttgtatgttagaaataataataatagcaaaggctacagatgcaagtgcatccatggtattatatccatctaataaaccagtaaataatggctgagttgcgtaatttccttgagcaggaaattgacttgcttgtcccattggattcacaaatgtagcaattaataaaattgataataataccaagaaaataggagtaagatacttaccaacccaatctagaatttgtcctggctttaatgaaaaataaatagtaaaagcaaaaaatattaatgaaaaaataatcagtcctaattttaaatatccatcagaaataaaaggatgaattccaacttcaaatgcaactgtagcagtacgtggaattgcaaataaagggccaattgttaagtataataagcatgtgaatatacttgcataacgagagctaataggcctcgccatatcaaataaactttcacttcttgaaagagctgatgcgataattcctaatataggtaatcctactccagtaattaaaaatccaatagtagctgtaaatgtatgatctccagcctgttgccccatttgaactgggaaaattagattaccagcaccaaaaaatagtccaaataataatgaacctattaataagttttgctgaaagcttagcttttgtttcataaataatcctccttaaatattttcgtattatcaaaataattatacttcttttattaaagtgtttatttttttgcagtttgataatacattgtcaatttttaattataatatatttatttatattagtaaaactcatttttgatatattagttaaattattctatttaaaaattaaaatgaaagggatatttatatatatttaagtgaaatcactttgtcgaataaatatgtatgtaaacatagtttttatgagttgcatatgacaatcagccaattattataatttttttagagatgatagttaacttatttgcgttttttaatgaagagtagtaaaaaataagaaagatccaaattcatttatagaacttaccgtatatttcatttataaaaatatatagaatttatttttttataataaaaacctcctagaagtaatggtatgttaccatttctagaaggtttaatttattacaaactaaaaagtttttttatttcctcatatttttcgtgagtaagtaatgcatctttgtctgtatttttaagtttgacaatataggtccatcttccgtatggatagatttttgtaatcaatgataaattgatgatataggatttgtggcttctaaagaattgagtatggtctagtttttcttctatatcggataaagaaatggaagttgtgaagctatctgtttttgtatatataacagtggaactttcttctctttgaactaaaacaatttccttcgtatctacaaagcttatgccttctttattttttatcataagcttatccaatcctttttcgtgttttattattttatctataccatctccatagcttggtttatttaaatttttaattctgtctaaggtttgcattactctttctactttgaacggttttatcaaataatcaaaagcatacaactggaaggcttcagacatatattctgcatgagctgttgcaaagataattatagttttagggtctatatcggttaatattctagcacaatctataccgttgtacttaggcatctcaatatcaaagaacaccacattagggcggtgctctttaaatatgcctatagcttcttcaccattatctgtttctccaacaacttcaaagcctccagatttatctagtatttttttaattatagttcttattcctatttcatcgtcaactataagcacttttatattcatagaataattctcctaatttaaaatcttctttttctggttttactttttggctttccaactatctctgaaagtataatagcttgttgaagtctaactggtgttatttcctgggtaatagaatctataattccttgtggatttgaagaagctgcttcttttttatcataggtgctattttttgtattattataagaatgcctgttttcactagctatatcgtcaatggaatcaccttcgtcatattcttcatcgtcattctctaactctgtatcagaagtgttgtttatactatcattcaattcggttgcatttggatatttgaaaacaaaatttcttgaattattgtttgatatggacgtaggattgaatatagcatttgcaagaatttttaatagattaacggtatcatcatatttcatagttttcactctcccaggagtctattttttatctctctgttctttgctatcactagaaagagattggcttttatttcccgcactagaaattgaacttctcatacttgtatctgcaataacattttgcatatcataataatccattattccaagttttccttctctaagtgcataagccattgctcttggtacttcggcttctgattctacaacagcagctctcatttcttgctctttggctacagccattgctcttctttcttcagctttagcttgagctatatttttatcagcttctgcctgtaaagtttgaagttgggctcctatatttcttcctacatctacatcagcgatatcaatagatagaatttcgaatgctgtaccagcatctaaacctttatctaaaacagtttttgaaatagcatcaggattttctaacactgtcttatggctgtgagaagaaccaactgtagttactataccttcgccaactctggctagtatagttgcttcaccagcacctccaactaacctttcaagattagctctaactgtaactctagctttaactaaaagttctataccatcttttgcaactgctgaaacatttggagtttcaataacccttggattaacgctcatcttaactgcttctaagacgtctctaccagctaaatcaatagcagctgctttttcgaactgtaaatctatgtcagctctatgagctgcaattaatgcattaactacattatctacattaccaccagctaaataatgggcttctagttgattgacattaagccccataccagcttttgttgatttaataagtggaatcacaattttagaaggtataactcttctaagtctcatcccaatcaagttgaatatgcttacttgaacgtttgctgctaaagatgacacccataatcctattggtataaatctaacaaacacagcaattaaaaatacaactgctattactactataagtaaattagtaatcattaattatctctcctttaaatataaatttatattttagatttctttactagtaattttactccactaactttaaatatttctacattagtgcctttgcgaatgtattctccttcagaaattacatcaaatttaactccgtctatatctacggaaccagttggtcttagatcagtaacagcaactccagtctttcctaacaaataatctaaatctgaggaactgatatatccgtgttctttcttttgttcatcgggaagaattaacggtttaaagagctttccttttgtgaaaaaagttagaacgacacctaacattattccaagaattgctaaaattcccaatgccataactaaggcttgtgcaaaattctctgcagttaatgccactgcaagtattaaacatatagctccagcgattcctggcaacccaaaacctggaatatgcatttctaaaagtactaatccaaaccctactattagaagtaaaaccgtaagaactgttatatccggtaaaaatgcgctcatattttttatacctccctccttggtatactgatataataagccacatattgaagtttagtaacataaaacttctaagttatacattttttaagctcaaatgtcatttataagagtgatggcatctttggaaataaatttatcagattttattattcttttttgggtagaataacttcgaaagatgttcgtttatcatttgatgtaacttcaatggtaccagaaaaactttcaacaatttctttaactatagcgaggcccataccatcacctttttcatttttggttgagaatccttctttaaatatgctgcctataatttcagttgggatacaatctccattattggatatattgagtcttatattttttagatcttctgataattcaacaagcatatatctattgcttggtttttgttttaaagcaaatatagcattatctataatattgccaataattctgcaaaaatcccatggttccatattaagattatttaagttgctttttatttcaagctccatatctatattgttcttttcggccacttgtaattttgcctgaaacaatgcattaactgctggcttcgaagtctttaaagctttgctaattcttactatatctttatagacaggttctatatagtttcttgcttcctgaaattcttcgagttccattaatgagtaaatcacctgaatgtgattcaagtaatcgtgacgttgagatcttaatgttttattgaagtcctcaaggtatcttatagtatctattaaattattactgcctttcttaaataaaaaattataaaatattattcctgtaataatactattaatacctatgcttatagctacgacataaattataaaatttccttcaatcatatgtggattttgacttttgtagtaaataaatagagttataaagattatttgtattaagtttaaaaatatagatgctagtacaatcttagagatgttgtaggggtgcttttttattatcatactttacctccttgcaaataaatgacaaatatattttaccatgtttctcttaatattaaccttgaatcaccttaatttattcttaatcagtgatagcaaaaataagagctgcttatatagatgtagaaaagtctatggaaaatttggaacataatatatgctacaatttaatttttacatttgggtattaacgtagctcacataacttgaattttaaatgtgaatttattgttgcagcatatatgtggaatatattaaatttatttaccaaatataatcaataagtatctctgattttattgtatgtaaaaagaaagagtaggttagtttgtatgcaaatagtgaaaaaaggagtttgtatacttaaaataaggaggaataaattgtaaaagttagcatgtatagcacaaagatttatagtataatataagataataatgaaggataattaattatatggtcttataaaattacgctgataaatatttgggttattaacaataaacgtaaaatgaattatatttaatacgtttttgatgaatttagggaggatttatgaaagataaagaaatgtttattgaggaatacggcgaatttaaaatgcgaaaattaactgaagatgatctagaacagtttaatgggcttttacgttatgcatttcaaataacaatggaagatcttttgcgtaccggttggacagaagagcaaattatgcatgccaaaatgccaattcttaaaaatgcctatgttcttggttggttttatcatgggaaattagcatcaatgattgtagtatattccatgaaagtaaatatccatgataatatttgcaaaatgggtggggttactggagttgctacttatcctgaatacactggaaaagggttaattcattctttgattaagcgagccattattcatatgaatgaagaaggtcaggttatttcttgtttatatccatactcaatccctctttatagaaagcatggttgggaaatcatttctgataaaataacttttacaatcaaagattcgcagcttcctaaaaaaagagcagtagaaggaatgatggaacgtgtagatttagaatgtgaagaccttttaaatgtacatgattatttttcaatgcagagacatggtgcaatgattagagatgagcttgcgtgggatgaatattggcgttgggatagtgatgatataattgcggctatttactacagtaagaatcataagccacttggttatttaatctattatattagaaatgatatattttatattaaagaaatggtttatttaaatactgaagcacaccatggaatttggaattatataagtgcccattattctatggttaatgaagtgaagggaaataatttttcgggagaaccaatggcttttttatttgaagatagcgaaatagttgaaactattaaaccatactttatggcaaggattataaacgtaaaagaatttataataaaatacccattcttagtaaaatcacaaaaacttaatataagcttcaaaataaatgatcctattgcgcaatggaataatggaatttttaatatctattgggatgatgaagaaacagtctgtgagaagagtgatgatatgtatgctgctaatttagtggaaatggatattcagacattaacaactatgcttatgggatataagcgtcctacattcttatatgagtgcggaagaataaaaacagaatattatatgcttaaaattttagaacagttaataccagtagagaagccttatttttcagattatttctaaatttaaagatatagaaatatataggtggttatatatcagttccttacagtggatttttaaactgcgtaataaaatctcaaacgccaaagtcatttgtgattttgttctaattgatcaaggaagtataacttataggaataaataatagtcttgaaatatgatttgtttcaagactatttctgcattaattataaattcagaaaataatttaacaatataattgtattaataatataaaattagtgaaaagattactactttatgttgtattaaagtatcttgcaattctaaaaaaggttaaatgtatttaaataataaaatgacagagcataattagaataagaattctttttgttaaatacttatacagcttttgaattacttgaactatcatcttttacttttactgtttggccaattaaaaatatacatatccctattaagataattagggatccgataatttgattataagatatggattctccaagtattaagaatgctaatgtgcacgttccaacaggctcacctaatatactcatagaaatagttgaagcacttaaccacttaattagccaatttaaaactgtttgaccaagtattgttgaaattaatgctaagcagaagaaccataaccaatcagagtttgcatagccaattagaggatattttaatatgacagaatatgctaataaaaatatactactacttaaataacaaatgaaaacataagcaactagagataaattttttcttacactttgtccaataaggaaatatgctgtaataactccagctgctagtaaagcaagtatatctcctatcaaggctatcccaccaattttaaaatcgccaaatcctattatacagcttccgaatatagataaaaaaccaccaaatagtgatagtttctttaatctctcaccaaagaaaaaatagcttcctataaaagcaaatagtggctgcatagttacaagaactgttgaactcgcaactgaagtaaaacgcaaggattcaaaccaaagtatataatgtattgctagaaaaattcctgatgaaaacactgccgctaattgtttgagtttcaatttttttatttctagtatgtattttttgttaaataatattacaggtaatatcatcaaagttgaaaaaactaatctatatgtagcaataattggagctggagctgctgatagttttacaaatatagcagatgtagaaatagctaaaactccaaaaaataaaaaaaagtaatgtataattttatgtgaattcttcaaaaagattacgtcctttctaaataaaaataatttcataacatttctttataaatatagttatatgatttaagactttttttaaatgtataaagacgagtaactcgtttatcatgtatatccctcttttgcttgatgaattcttctgtatcaaacttttgaatcgcttttgagacagaaattttatccatatgatatgtgaactttaattatcatataatatgtttgttgaaagttcaactattattaggtttattatttatagtctaaaagtatttatgatatagataatttataattattaattacgtttctgattgttttaaattctaaagaataaatattcttcacaatatttattctttagaatattgccatattagaatatatattctaaagaatatgcttgttaaatgcgggctgaaagcatttgattttatcgttattttagagaacaaatcatatatctataatagaagtagataggatttcgcttatctaggagtatacagatgttactatatatttttctatttaaaaaagtgggagagttactggaggtatctgataaatttttagagtgattgtaaacattaaagctgattgggaatcgtgagttgatagttataaaattgctagataaagagttggaactagagtattaaaaagatagatacggaattacagcttaagctatagaaagaagatgttatgagtgattagagaatttgaaagatatatttgatatttgtaatgaaataaatatgtataatacaaataaatttaagtatgtacttatatatgtgatggaataattaaatggaaaagagatataattcccgagtggagtagaggggagaataatgttaggatctattagaatacaacggcctcttttgataaaacatactgggaatgtatctagatttgcgtaaaacaaatctagatatattcaacaagtacataaaaaaagctgtactacaaggtatttaaaccaagtaatacagcaatccaccaaaacaaatggtgccgctggccggattcgaaccggcacgatatcactaccagaggattttgagtccaccacgtctgccaattccatcacagcggcatgtaaactgacaaaaattattctaccatgtcttaaagaatatttcaataggtatttttaatttatttttatttttggaaaattaatttataatatccatataaaaatacataatgaaagtattagacaaaattttatctaattaaagctaatataagatttttattcatttgtagttcagattttcaaataaaagtagataaatgtgcataaatttttaaataaaggttgtggggaatcaaatcatttgctagaataggaatagggaaaagtgccccactgggttattttatgcccaactacaattttaaacttagaaataagatttaataatttgtaattatctattaattagggaggagcaaaaatatatgatgtattcaaaagaagttgaagaaatgtgtgtacttgctaaaggtcctaatcacggatcagcgccaattcctgtagaaggaagatgggttcaatctaaagaagtaactgatatatcaggattaactcacggaataggttggtgtgcaccacaacaaggagcttgtaaattaacattaaacgttaaggatggtataatccaagaagcgttagttgaaacaattggatgttcaggaatgactcattcagctgctatggcttcagaaatattaccaggaaagactatattagaagcattaaacacagacttagtttgtgacgctataaacacagctatgagagaattattcttacaaatcgtttatggaagaactcaaactgcattctcagaaggtggactacctatcggagcaggacttgaagatttaggaaaaggtttaagatctcaagttggtactatgtacggaactttagctaaaggaccaagatacttagaaatggctgaaggttatgttactgaagttgctgtagacgaagataaagaaatcatcggatataagtttgttaacttaggaaaaatgatggaaagcattgctaaaggtatggatgctaacgaagcattagaaaaagctaaaggtcaatacggaagagttgctgacgctgctgaattattagacccaagacataaataattatttgtaaaggaggatttttaaaatggcattatttgaaagttatgaaagaagaattaaccaaatcactccagtattagaaaaatacggaatgaaaactatggaagatgctaaagcagtttgtgctgaagttggagtagatccatatacaatcgttaaggaaactcaaccaatcgcattcgaaaacgctggatgggcatacgttttaggtgctgctatagcaataaagaagggttgcactaaggctgctgatgctgctgaagcaatcggagaaggattacaagcattctgtatcccaggttctgttgcagatgacagaaaagttggtttaggacacggaaacttaggagctatgcttttaagagaagaaactaaatgtttcgcattcttagcaggacacgaaagctttgctgctgctgaaggtgctattaaaatagctgaaaaagctaacagagtaagaaaagaaccattaagagttatcttaaacggtcttggaaaagatgctgcattcatcatttcaagaatcaatggtttcacatacgttcaaactcaatttgactactacactggagaagttaaagtagttaaagaaaaagcatactcaaacggagaaagagcaaaagtaagatgttacggtgctgacgacgttagagaaggtgttgcaatcatgcataaagaaggagttgacgtatcaatcactggtaactcaactaacccaacaagattccaacatccagttgcaggaacatacaagaaagaatgtatcgaacaaggtaagaaatacttctcagtagcatcaggtggtggtacaggaagaactcttcacccagataacatggctgcaggtccagcttcttatggtatgactgatactatgggaagaatgcactcagatgcacaattcgcaggatcttcatcagttccagctcacgttgaaatgatgggattaatcggagcaggtaacaacccaatggttggtatgactgttgctgtagctgttgctgttcaagaagcattagctaaatagtctgaaaattatcaaacaacaataaagtcatgtcacagttaataaacttgtgttacagataataaagttgtgttaaaagttgtgaaaataatgaaggaaaacctttgttatttcacaactttttttattttggagaaaagaaagaggaaatacaggaaaatagcgggagaagaatattgaaaagaacgaggaggggaatttgtgctaccgagtcggcgatagccacgatcctagagtaatgaagagtaaaattgagagagaaataaagactataataatgaaggaaatcctactgctataacatgactgtattaacttttatctctaccaaatttgatatataaatggaagaaaacgaggaaattataacacgactttattttgcggctacatttaaatggttttacctagttaggtagacggttctaaatacgcacatctaatagattttaatatctatagatgtgcgtatttttttatacataaaaagttactcatgtctataggtgtgtggagatgtattagaatgaggaaaataaacatgaaaactaaaggttgtgtcacagcaaaataaagtcgtgtcaaaacttctaaagtcatgtcgcgaaaaataaagttgctttgaaaattaatgaaagactatacaaagaaaatgggagcgatcctgttggacatgcatagccttttttgcgtttagtgaaaaattaaataaatattctatcacaagtagttatgaatatatattgaaatataatggctatttgaagaaaggatagatggtatggagacaataaggaatttaattaataatgaagtgactaaaatagagaaaaataggttttcaatgaatttagataaacttataaaagaaggagagatacagaagcgtaaattatttcagataaataatcatataaaaagcaaacttttaaactgcgtaaatttaaatcaagtatttaatataaaagtggaattacctgaaattccatacaggttaactgagaaattggatggaaattttatctattttagaaatgtaaaagtagttgatacactatgtcagcaaagcataaacaagtttaataacattgttgatgatattttgaaatattgtagtagaatttctcaatataatgatgttattaaagacattaaatgttacatagatgataatgaaatggataattttgatgacatcctaataaaatttgagtctaataaaaatagagatcttttctgtttaatgtgtaattttggcaattcaaaaattgatagaattaaatgtcttaaagttgaaatattttatggaaagtttcataagaaaaaggattatagttttggtaaaggatttatggaattaggtgtttgcacgtttagttcacatccaagtattgaaataacggcaattgatataagaattaaaggtaaaagattaggaatcggaacatctgctttaaaatggctagaacaggtaataattcctgaactaaatagaagaattgataaatttaatgatgaacatgaaaataaagaagacgattttaaactatatcatattgaaaatgtatatgggtgtagcggagatctgagttcagatacagatagtgaagcaaggaaaaggttttatactaagaacggctatattatgaatggatataaatttacaaaagtattatgtactagaagtaaaataaagttttccaatagcaggtaatttattttgggattaatttctagtgataagatttaatatatatgaaataagactggatgtattaatgatatatagtgtgtattatattatttgttatgatgtataaagttactttatttattttatgtttaatagatatgaattgaataatgattaggtgagaggtatcagactataaattaaatagataatgctttgtataaatatcaatattcgttaaaaattaatggaagactatgcaaagaagggtggagagatcctcttaaaatgcatagtcttttttgcgtttggagaaaaataaaatggaagaaaagccagaaataatgagggattaagcaatgtaaaatagacataaattttaagcagcattcgcatcggcagcagccatgagcagaaaaaatgaggttaatttaggttcttggtgacataactttattttgctaatcgggaggattatttcttttttattccgtttttaatcttttttgttgtgatttaggtaaaaaaatatgacgcgaccttttttactgatacagaaagaataaaaaatataatatttattttttataataataatttgaggtaatatttaacttaatacaagtaattaaaagacgtatcgagataatacaagtataagactattaatagtaggatattgtttatattttatctatggttcttattataattaaaaaggaaaatttatgaatatagtgtataattaatttatcatgaaaagtagcgttggaggatgtggagtgaatttaaaattaatagaaaagatgtacgaggatattgataatttaccaaaagggactagtttatataaaatggatttgcatattcatacaccagcatcaaagtgttataaaaagagttgtgatgatgtaaaagatgaatatataaaaatattagatagaatattagaaaatgatataagaattatagcaataactgatcataatacttttgatggatattttgaattgcataaattaataagaagtaacaatgagtttaaaagaaaatataaggatatattaatacttccaggagtagaaatatcaaatttcggaaagcattacttggcaatatttaaacaagtaaaggacaatgaatatgaaaaaataaaagaaaaattaggaatgtttttaacaaagataggtatagaaattgatgaaagagggaaaccagattcggatgcaattaatgttacaccaatacaactattaatggagattgataaaattggtggaatatcaatattagcacatgccgatgcgaataatggtttattggaaaatttattacataggggagaaaaggataatttaaaaaatgaagaaaaaaacaagaatagtgactggctagagagtggaaagtctgttgctaaaatagttacatctgaatatttaacagcaataagtttacataatagagtttataagaaaaagttagaaaaagaaattctaaattcaaaaccatatgttagaaaaggtgctataggaataatttattgttctgattcacattcaattaattctgagttaggtgcatcaggtggtcagataggagaagaatattcttatataaaattatcaaaattatcatttgaaggtttgaaattagcattattagatcctaaaataagaatatttgataatgaggatacgtatgattaccctttcatatatggagtagcagttaaaggtggatttttaaatgatgatgatgactttaagttgttcaaattccacaatcaacttaattgtattataggggcaagaggaacagggaaatcaacaatattaaaaataatacaatatacattatggaatgaaagaaaggcagggaacgactgtcaatttgaagaagcagtagtatatttaaaaaataaaaatgactgttatgctatatatgtacaacctaaaataaatcatgattcatatacaaatgaaactagaatagatacaagcaaaaaagtaatttatcataaaaaaggaaattttaaatttgtaaggaaaaatataaatgataatagaataaaagaaatgtttttaaaatcatttacatcctataaacaaaaagatatttataattatgcagcagaagtagatggaactaaaaaaatattgagcaatcttttaaaattagaaaatatagatgctatatatgaagaaatggttataaaaaataatttcattaattcattaaaattaatattacataataatgaagaaataattcaatttgaagattttattgatagaaacggtgattatgaggacgaatatgaagaacaaattgtaattccttataaaaattatattgataaacagatagaaataaatgagaagtatatgaatatagtaagcaaaattaataactcacttggaaagcatgtgaagatagatataggaattacactgtttacaaaagatgaaatggaaagaataattaatgatatttgtattagattgaattcaaaatatgaaaatgtagtttggctaagaaaaaagttgagacaagttgctacttttgcaagtagaaacaatgagtggtatttctggatttatatattaaaaaatgattctaaatcaattatggataagtataaagtaagtgaagatgatgtaaagaaactaattaatttatgtagaaaagcactaatccataaaaaagcatatacagtaccacaggcgataatagattttgaatataatgtaaatacaggcatttccaataaatctatttttagaaaaagagaacaattatcattaggccaacgttctgttgcaatgctattgataattataaaagcagcctatgatttgggtgataatagaccattaattatagatcagccagaagatgacttagataacgtatatatatattcaagtttagtaaagcattttagagaagtgaaagaaaaacgacaattaatatttgctactcataatgctaatattccgatatcaggagatgcagagaatatattaattatggattcagatggagaacatggttatctgaaattaaatggatcaatagataggcaagatatttgtagaaaggtattagaaatattagaaggaggaatagaggctcttgaattaagaatggggaaatataatcaattaatcagataattacaatatatagagttagaagttacagtattgtaattaaatattactttgaatataaattataaatgtaggtttaaaggagtagaggatatgagagaagaagaatttacaaaatttctagatcaggatagcgatatagttagtaaggacaaggctgtaagatccagaattagtaaagcaagaggtgtagaaaaaaaatttaatattgatttagataatatagttaaagacgatgataaaatgtttgacttattagtgaagataaaaaatgaattaggtgattctaatggagcaaagcaaaatgctgttagaaagtattatgtatttgccaataataaggtatttccttcaatggctaattatcaaaaagataataagtaattaaagtgaaatataagttttgataaattaatttcctaaaaacttaataaatccttttgagttataaggaggagtgtgtgtggacaaaagtaaagttataagtgaaatatgcagtagccttaatgaagataataaagtgaaatgtgtagacataatcagaaaagaatacccatttaactatataaaatatgagaaaagatcttatacaaaatcaaaactaacaagaatatttattcgtgatggatttattgatagatattcaggtcaaagattgatttttccagcagtattaagaatactttcaaaagaatttcctgaagattttccttatcattctaattggaagatgaatgaatgtcatttagcatattgggaattgtttcccactgttgaccatttagtaccagttgctagaggtggaaataatgaagatgataatttagtatgtacttctatgttaagaaacagtgctaaatcaaattttacattagaagaattagggtgggggcttttagaaaagggaaaatttactgagtgggatggattacttcagtggtttattgattatgtagaaaaaaatagtgatatcttggaagattattatattaatgaatggtttaaggctgcaaaaaatatattaataaaatgaaaatatatcttaatattaagtattcaattaaagtaatgttaatattaaccgctgtagaaattctaaacaatgaacattctaaaatgcttcctcagaattctcggaatgcttccagagaaaagacaccagatggattggataagtgcataaaggagtatctaaacacggatttaagaactgccaatataatatcagatatactaaaggatgctggagtagttgaaattattgatgtagaaaatcctgttactggaagaaaagtaaaaggaacaaaattgttaccaaaatggcaatggtaagttaatgtcaaaaggagagtttaatttgaaatttattgatatagatgttcatttacattcagtagtggttgctgtcatagatgaaaaattaaatattatggaagttagcaatgtttcttttgaagaagcaataaataaaattgaaacatatttgcctaaggtaatttctattgatgctccatcaagtttgaataaaggttttatgaatgatgaggagtatagaaaaaatataggccgaaagataaacggtcattataataagaaggtatctgaatatgaactttcaagaaggggaataaatccattcccaacaccagatacaatggaaaaagtaagaagcagaaatgatttatcatggatggaaaacggatttttgttatataacaatttgattgaaaaaggatatatgctcttaaatcagaataatttcatggagaatgtggagaagggtatagtagaagtgtttcctcatggatcattttcaactttggctggacaactattacaaaataaaaatactgatgaaggattaaatcaaagatggttattgttacagcaactaggacttaataaattagattttattatgaaatatgtaaaaagaaaagataaggatgattatttagatgcacttgttgttgcatataatggatatttaattagtactggaaaaggtagttttattggggatgctattgaaggtcaaattgctttaccaataaaagatattaaggaatcatataaaagaagtaaacaaaaagaaaaatctattgttacggaatatcgaaatgatggtatttatgaatatgagtttctacataatgatagtgtattatggctaaagcattttacaccaataaataatactcctgatataaaagaagtgctaaatattgaagaaaataacgttagtgtatttgtgattataacaaataatcaaggaaaatcagttgaggtagaattgactaacatgaatggtagaactcaaggattaaaggttacagataaatataagagcattttaaaagaattatggggaagtcatggtgacgggattaagtataaaattgaagttcaaggaataagaaaaatatagtattttattggagagaagattgaaggtgttttgggtaacgtatcttaaactgtaaatattacctcacctttttagtacttaatattggggtataaaaaagaacgtttaagaaatactcatgtgaccgcaatctctccagttgtgagtgcctacagcaaatacttagaaaaatattatataatgtgcgataaatttcaaaactgcctagttaataggtagtttttgttatataatctagtattatgtagatggaatcgctagatttatatggaggaattattatggtaagttttcttaatatgaaatatgaactagaattagatagaatgataaagatatttagcaattattataaatttataatattgagagaagcactttctgaaataagaaataattttttaaaggaatatttactaaatttaatgattggatataattatggtattgaagtaattatgacatatataccgcaagaaagtgagaataaagaatggatatatgattatttttttgaattttatatgagtatgttgcaaaataaactaattgaattggaaattttatttgaaattaaaaatggactaaaatgtcctaacattgatctatttaaattatataaaaagaaatacatagaaaaactgaaacaagatatattagaatattggaatgagcaaaaaatagataataagttagttggagatagagattttataaaaatgtttgatgaaatccatgattatgcattaattaagtataaagatatttttatgagaaggttaaaacaaattaagtatttatatagagcagcaagaggaaatcattttggtaattatgaaagaatgattcctaaaagtgaattttgtaaaaataataggtggaatcctgatggaatagaatttctatatttggggtgtgactatagcctacataagaaagattttattaacaggcctaaaaaaacatgttgtgaagaaattagattgaaaataggtgaggatgttacattatgtagatttaaatggactaatccaaattcaaaattattaaatttatatattgatgataagtttgtagaaaaagaaaaagaaaatttaaatattttatgcaataaagaaatagagaaatttaagagtgataataaagcaatttcagttgttagtaaactaagtaatcaaggaaaagttgatgaagcaaaagaatatattaaattaaaaactaaaagtaaagtagataaaaagtatgcagaaaggtatgttagcacattattaatttcagatatagttgatgcaatattcaaaccagtagatgaaagtgaagatccgaaattagaagcatatattccatttagactctttgctacatatttaataagcaaaggttatgatggaataatatatagaagtacaagaatggatttaataggtgaaggaggaaagaatgttgttctattcaataaaaatgatgctacttattgggagaataacatggaagtatatcattatggcgaagatggatacatcaaaataaaataacattaatattgaaaatagttaaatataatcaggggtggaggttaatggtcactattttttttgaatagataaataaaaggttggatggtgaaaaaatgggacataaatatatttcatgggataccgttgatttaattaaagatatgtttttagaaggtataccaaagagaaaaataaagttttctataagtagtatggatttagaggtggagtttgatagtgtatgtgtaaatgaagattggtatagcgaagatgtaaaaaaattcaagtattattttatgaatgatgaagataaaagtgttttaagaataaaaaataggtattacgaattttttatacacatttcatataagtcaggagaaattagtaaaatatttttaggcacagatcctataaaatttggaagtgattatttctgccaaattcaaataaaccaatgtatagaagataatgattatatctatatgttaaaaaaagtaagtaagttatcaggagatggagcaatttctagactaaataaaggtgcagaaaacactgctgaaaaacttaaaagacgtcaaagattagttgaaattcttaatgcagatactttaaggtttaataatgatgaatggattgtaatatctaagataaataaaagaaaattaaaaaataaagataattggaatgatatttatacagaagtgatatctgaaattgttcgatatgctatttatgtagaatatattttagttgaaaaacatatataagaaaaaaaataaatcaaggttttttattgattctgattttgatgcattcgatgaaaaatttgcaacttcagaagatgaaaaaattattggcaagagacaatacgtaattgataatagatttaaatatctacattttgatgaaagaagtggacaagggcttgtagatttttttaaaaagcataatctccatcctcattggcaaaaaactcatttaactaatgtaatatggccatttccaattgcaaatggaggatatgttgattatgtaagaatgggctatggaaaggatttacttttagtaaaggagttagcacggagaacaggagtgttttcagaaattacagatcaaggagtacgagatgctattgctttcttttgtgttacacaattacaggttggattaaatcaatatggttggtggataaacttatatatcgataaaaaaggatggatagaagaatacaatttgttagaaaagattaaatccttagtaaaattaagaaaagaatttttagatttattgattgatataaataaacaagggtataaattttatataactgtacatccagatgaagatattaattatgctgaaaataatcctgaagattgtataaacatgcttgaaaaattaaaagtggctaagaaggctttctctatatcaatagaaaaatttcaggagaaagatgtgatcgaaaataattatgatatgctcaactatttaaaagaagaatttacaaagttgttacctttatacaattttatatcatggcatctataaaagaataattacttaggaatttaaagcgacaagataatagcataggatatctactatgggaagttgtagattttgtataggtaattaaatgttaaaaatagttgcttatagtttagaaacattatttaaataataatcactttcactaaattttgtgccttgagcatagcgaaaggaatgaccgttattatgaatatgacagtagaattttttgaatctttacttaagttagataaaaaaactcaaaatttaattttaaaaaaatatattaaatcagagtataattttcaaaggagtgggggacggttacataaactagatgaaaaatgtaaaaataagaacctttggagtttttctttgaatgaagatatacggttaatgctgttcagagataataatgagtttactgccgtatatgttgaccatcatgaaaatgcttataattgggcgaataaaaaagattctaattggaattactctaaagaaattttaatagaagaagatatagatatagatgaaaatagttatggtaaaaaaacaaatgttataaaacaaagcactgagagttcaattttaaaaaatcaaggtgtaagccacaaagagttaatacaaattggtttaaattataatgaagcacaagaaataattaaaattaataatgatgatgaatttttggattatataaataaatgtgacaattcaaaaaaagaggcattattaagattagcagttggagataagttagaagtatcatgtgatgataaagattctcatattgctaataggcagaatagtacattgaaagatgaacttattagtataataaaaaatgaattacaagaatttaaaatgtcaatcttagaacaatcagaaaatataagtaatgatacagaaaaaacaataacaacaaataaaacaatgtacaattatattgttgttattgaagataatgttctagaggaggttataaggaagaaaattcataaagaagatggccccttgtattatagtgatgtagtaactgttacaaaattggagtatagaggtgatggcatcaaattaataaatgacttacgaggtattcagcatttagaaaacttggaagaaataaattttagttgtaataatataattgacttaacacctttagcaggtttaaaaaaattaaaaacattaattctaaatagtaatagaataagtaatataacaccgcttaaggaactttttacattagaaactttgtcgttagcatttaataatatagaagaaatcagtggattgaaagatttaacaaatatctatgcgttacatttatcgcataataaaatagaaaatattaatgttctagaaaaattagtaaatatagtagatctaacaatgggagataatgaaattaaagaagttaaatcattaaagaatttaaataaattagagatacttgatctaaggaataataatattactggtatctataattttgaaaatctaaaagaactattttgtttggacttatatgggaataagttgaaagaattttcttttttaaaacatcttgagagtttagaagatctaatggtattaaataaccctatcgaagattattactatataaaaaagtttaatgataaaatactttcactcccctatggaataaatacagcagttacatttattgatgctgaatttgttaaagttttacaggataattcaataggaatttatctatgtgaagaagatttatgtgcaatagaagaattggatgcaagtaatagaaatattaaaaacatagaaggaattcaatttttcactaatttaaaaaaactgaaactaagcaataataagattgaagatatagaaagacttagggaactacataagttagaagtcctcaatttaaccaataattatattagcgatatatcgccattagaaacactgacaaatttgaagaagttagaattaaaaaacaataacatatcagacattaaaccaataataaaaattgagaatttggagttgctatatttatcacataataaaatagaaaacttagaattgttagcaggtattattgaaagtattcagaaaaaggatttctcagtattaccacaatctgaagatgataaaatcatacaaattgaaaattgcttaaatagatggggggaaggttccatgttttatgagtattttgtgcaaggaaaagcctattctaggacagaacacaactctgatttatcatggaaatgcgattatatcattagtgaggctagttggggatataatgagagtgatgcattagcgagatttgttaataacttttctaaaacagtatttaagaatgataattattttgaggataatttttttgttgtattaaaaataagaccaacaggtagaagtaaatcaaattacacatactccaaagtagaaccgttttttcagaatagtgaagatacatacaataaaggtattatctcaagatttgtaataagatttatgttttctgagactgagactgaattaaataactattataatgaatttattgactatacaaatcgcagaaagtatcaaccagaaacattaaaaaaaatgtatgatctatatttgaaatgttttaatgaaattcaaagtggtaaggtaattcaggacgactttaatttaagcggtaagtttataaaaagtacagaagataaggaaaaaataagtttttatgcgactgctgctataaaatattttaaaatgtttggtaataaaattgaagaacaagacaataaaattaagatattagtacctaaaattaatgataagtattttgtttttgaaagagcaattgaatgctcaaataatttagatattattttagaatgggaacattttttgtttttaagaaatatgaaaaaagaatctattttagcatatctgggatttgcctttgaggagcatagaaaaaatgttaatcaatataaagaaatttttcgaaaacatggcatgatgctgttaacaacaaaagacttacatgatgatgatttgtggtatgtacttgcagaacatgaacaaaaggcaaacgaattacttgatagtttaaatataagattacctaattcatatgatgatgtacttgtatctagaccaagtggaggtgaaggagtgtattgggctgaaggggaagagacagaggaggaattttgggagcatgaagattaatcttagataatataaatagtctctttatatatgttgataagtaataaagtttagttaaagataataaagtatgattaagaatcatgagtggaatgaaggagaaagtcgaagccattcatgattttttgttttgtggggattaaaatatagttgaaagattagtctgctcttgtagcatattgcagttgcttcgagcagactttttcatgttgtattagatttaccaaagttataagattatttattcttatgaaatcaataatttttttgcttctaatataaatttatctttggaataagtattaattttaaattgatgaaaataaaaatcaccacttccaatcaaccagaatactttatcaactttaaagggtacttcatttattgatttagaaaacttaataacatcaataaatagttgttcatcagtagtagaattagacagaccaattcctgtgaaaatatctcttatatgtatatcaggcttaatgtaatcactatatcctatttcctttaaaaagtcacaggaaagtgcaaatccatagccataaatattatttcctcttgataaccataatggaagacttagttttagttcagagttattgtatcttttatctagttcatcataaaattcttcaattgctttgtactttgaaagaaatttagtaattgaaaaaatagatttactaaatttgacccaactattttgaatattattgatatccatacgatgagttggaacaatattagaattgaaaattagataaaaaatatcttgccaattagaacatttctggttaagttcatgtggatcatatgaatatagaatttctgtgaatctatctatatttcctatagaatttttgagatatctattatttttggaatgatgaaccattttttggcacagttctgaaaatgattttggcttggggtaattttctgtattagggtaggtatcgagaatttcttttgaaattctcttatcagataatagataattgattgcatatttatatattatattgtttttttcattcatgcttgtagcctcccaattacatatattaatttaattttattaatgtgccatagtctagggaaaaaggacaaaattcaattataaagagatacctagcagttaaatcgttattaaacttattactttgatcaactaataactcttctagttttgcctcaatactacagtggtaattactaaaaaaatgtatcacttttttattcctagaaaatatattatacattaggtctgtaagattatctctgatcataggttgtgttatcttaattttaattgtttcttctacgctttgtatgaattcaattaatcgtttatgaaagacagatttattaggctcaattatttcgtataattcatgtttttggaatgtataatttaaattattcgaatcaacaacataaattaaaccctctgtagattctttaataactttaaaaaattgtaagtttccagaatcaaatgttactgcgactttttcatataacacttcatgtactacattatcttcttcaatatagttaatgatttcttcagggtcccaattaatatctttgttaaaaaggtctttatttaaattcaagatcttttccaaagcatataaatatttttctggtacgatgcttcttccttttacccaattattaattgtctttgggctaatacctaattgttgtgcaatttctttttgttgtatatcaggattgattctaaatacatattcaatacctttcatagattatatacctccacaaataagattaatctctaaaaagattatacaatagagattaatcttgtgtcaataatcatttagagattaatctctaaatgattataagagtatttataaaatcatttattgctaatggaattagatgtaataggaatcaaattatattaaccatacacgaatgaaagttattaagatataacggttaatatgaatttttataaaagtagttatgctataaacttgtagaacatttagaaaagaaaaatgtacttttaattattcttaggattatattctgtaaaaattatctttttattgatataattaagaaaaaaggtaaattaaatagtaaacatttggataggtataacagagaatataaaagtatcaaaagttgaggggtaactacctctgtgtattatatagtatcttgagcagggagtgtaattccacgcaggacaattataaccttttacaaatattaaaggagggatgccgtatgattatacaaagaattttatctgtaaaatttgatggatttactttaaactttggaccaattgggcttaacttcgtaacaaggagttcctgctgaggattctatattgatatctaggcatatacatgtaaattataattgtcttttaagggagtgtaattgatgaactttgataaagagaatatagaaaaatttaacaatgtgtttagtgtggaaatggaaaattcatttaataatattgtagaaataataaaggaagtagatccgagtgaaataattgaatatttatcaataattgcttacttatcaaataacacttcaggagaaaatgaatttttgcagccgtcacaaatagaattcatatgcggtattatactggctcagaaatatgaaggtgaatataaaaaatttactccagaaaaaatacaagcctttctagataatatatataaatattttgcaggttggagtatgtctaattattctagacgattagttggtattaatgatgagaaagaggcggagaaacagttgattatagcatctttggcagcaaagtatggaattgttagaggagatgctcatgctgaacaaataaagtctcaggtgtatagtttatttaagcagtatgatgattggatgctttcaaatcagggctttactatagaggatgcaattaagtatattgatgctatcgtaaatagatataataaactattgttagaatatagaaatgaattatttaatcaaagcaaagatcttatagatgatatatataataaattatcaatagatgatgatgtcagtaagggttctaaacaagttaaaaactttatgaataaatataacagtaaaaaagggaaggaagaattacttggacttactgttgcgaacttatttgaggttacgtacaatgatattttatcatttgatattgaaacttttattgaagaagaaggtattagtgataaggaaaggtttattagtttcataaatagattttgtagtgaaataaacgggggcaaaaatactaagtttaagtacccgacagacgataatatatttagacagagaccaattataaaaaaagaagatagatacatagttcctaatccaatgaatttaatatggataattcaatatgaaatagaaaatgatatgaagaatgatgaaatttgggattcttatcaaaaacaaaagggaaatttcttagaaaaagaagtgttagaaacttttaaagatatactaccaaattgtaagacatatgattcattatattactatataaaagacgatgaaggcactgaaaaacaatgtgaactagatgcattagttatatatgataataatatattccttatagaatcaaaaagcggcttatttaaggtgccagcacgtagaggtgcaattaaagcattggaaacagcaatatatgaaaacatagagtatgcatttgaacaagccagtagggcaaaaaactatattattggaaataagatagttaaatttttaaatgctgacaattcagaaaaagtatccattgattcaagcaattatagcaatatttatttaataaatgctaccttggagaattttggggaggttgctactagcatacacaaatttaaaaatgtaggattatacaaatacaatgaatatccatggtcaataaatataaatgatttaaaagtaattgcagaatttatagaatttccgtcacagttcattcattatattcatagaaggctgaaaataaatactcagttaggtaacggttttgatattatgacatctgatgaattagatttgtttggaaattatttggatacaaatttattttatgatgatgaaaaagaaaatactatgatagcaattcaagattattcacaatactataatgaattttattatgcaaaaaaagaaggcaaatcagtagaaaaatttcaacaaaagatggatagtggttttaaaaatatattactggatttagaaaaattaaatcaacatggatatactgatattgtagttagacttcttgaacttgatggtgacacgagaaaacaaatttcagatagcctaaaaatgattggagaaaaaactactaaagatagtggaatacatgatgcaaccatgattgtattaagtaatcccaaagatgctcaaacaggattgggaataacagtaatgacgggtctatctaaagatagagaaagtttattaaaaaagttggaatcgtattgtaaactaaaaaaatatcaacaaagggcttttgagtggatagggttgggcaaattagtagatgatttaggttggacagtaaatgagtttttctattttaaatgggaagaaacctataatgaagaaaaagagaaaatatcaaatcagatacttataaaacctatgacctgggtagataaagtaggaagaaatgataaatgcccttgtggaagcggtaagaaatttaaaaagtgtcatggtaaatgatttaagttgtttatataaatattagtttatgaaaatataaaaagaaattattaacgacaaaaaaattgatacctcatgaaattagggagaatttccctggattttatgaggttttttattcggatataaagtatttagggattacaaagaagaatgcttggcaaagtgttgttagaaaacaaaagaataagtaaaacagacctgtaattatccttaattaaagagtgctagatataatattagggaaagtaaactttattataaatatactaattaataaatatacaggaatgtattaataatttatctgcaatgtaataataaaaaaatattgaaaaaatattaaaaaaatattgaaaataaattaaaaaagtactattatgtatttaatacaatattttccgggagggttatataaatggtaaataattatgaatatattaaaaaattaaaaaatcaaactcaaaagaagaagtctatcacaattacaattgatgaaaaagtcttagatgacttatctgaaattgcagatcaattagaaatatctaagaatcagattattagtgatatatcgagtgcgtttgtacaagactttaaaaatataagtcagccagaatactatataatcaattctaataatttttacatgccggaaggtcatcttcatatgttaaaaggaaatagagcatctgcatggggagatactaaaagtgcaatagaggcattaaaacctggagattatgtttttatatatatgaatgagaatggtattgtgggagcgggaacagtaaaatctaattgtatggtgaatgactacagtttggtgaaacattactctgatgatagaaaagattattcttatgatgtatgggatgagtattttgtaaatgtagagtttgataagaaatctttgaagttagatgaagaaggaaattacttaattgatgaacaaactataattaaggcatctgattacagagaaaaagtttcttcaaagccattaaatagaactaaaattcacttaactagtgaagaaggaaataagttaaaagaactatatctgcgaaaataaagaatagttactatttataagtcgatatttaaacagtactttataacgaagaaaagttataatatttaaaagtcaattaaaattaaattatgtgatttaaagcaaatatcttttagaggacaagtaaggaagggtgaattttaaaatgtatattatatttccaatagcgattatattaatttattttagtattagaaagaaaatctcaaattataataaaaagattgtagaaagtataaaagaaatacgctatggtaattttgatattggaaaattatatgatatttctagtgtgtttattaggtttgtatcagaattatttataatagttattattgttgccaccgagatttcttttattataaaggttacgatgagtgtggagaaagcaaatgaaatcaataaaataatatgtggaaatatattcattattcttactgtaagtttgttactttgggtattggcaactaatataaaaatagaaaattataaaataaatactaagtgtagtgataaaatgaaacaaaagttggagaaaaatgtaaagaagtcgcttttagcaataaacttaggccaatttggtatgttaataggattatcacttactatgtttatagtttttacagatgtattaggatataaagcacgaatcttagtttttattacggcattaataatagttacatcaatattaattgaggcatttaaaattgcacaatttgggttcataccatatatttttgttttattaattgtttatttagcattaatagtattgggaggatttttgtttggttcttattactatgtgcatgataatgcaataattatttcagatgagtcgattaataaatatttagaatattcgataggattagggataaatggattctttaattatatagacgttgaaagtggagcagaacatatactaaggttgatacagtttatctcagggaaaggaatagaatggatatatttgggctgctttagcacattgtttataacaaaaatgacatcaagaaaagaagagaatgcaagtgaatcaaatgataatgaaaaagatcaagaaatagatttttattatacaaataataaaatagaaatcacaaaaatcatatatgattctagtgataataaatgtattgtaacatatgaagttgataataagaaaaaaacgaagaaattaccagcaagtgtatttataggattagataaaattaaggagcaaattgtaaagagaatgtaatattgtgaatgtatgcttcaatggtaacatttattaaaaataaatatagatacataaaaatataattgggaaaatgaaaaagagcattatgttaggaaatattctggttcacaaggtataagtaatataagtgaaaattttagtcttatttaaatttaaatattatgattcgggggatgagttgtgaagataagttttgtgagtgtatcatataagtcatatattgatgtttcgtatgaaggcttttattatgagttattaaatcatattatatgtccagaaaatcaaaaaaaagttggagtaccaattcaatgcaacgaagaaacaaaattaagtattacaaaatatttaaaatctttacattttgggaatgaagtgaatgcattaattgctttttttgaaagaattccagtaggaaattgttattatattatacctattgaattggatgaggattcaatggatgaacttcgaaataagttgattttttataatgaaaagtatgatgaggaatatgtaaaagaaaaaatgattccatataataatcaaaataattatattaaaaaggaagcggcattttattacgaaaattatattcagagatattataagtttgggaagattcagaaattaggtactactgatagaaaacaaagaaaatgtatatattgtggaaagacacaaaatgatggtgctacatttagaaatatttctcatgcaataccagaaggcttaggtaataaaaagttaattcagaatgaagaatgtgaccaatgtaatgacgaatttggtaagggtattgaaaaaaagtttatggactttgtagggataataaggacattaggagggattagaggaaaagagaataagataccaacatatattcataataatataaaaataagttatgaagataacgaaaattcaatagaaaaaataaaaattgatattccagaagagaatcatgcagagttaataagggagtcatcttcgattcgtattgaagatctatataggtttttatgtaagatggttattggagttatagataaagactatagaagtgatttgacggatataatacaatgggttagatatggtgatgtacctaacggaattgataaagaaaaatatcaattaccacctattgcaataagaatggaagaagaaattttaacggagctggatattattgtttttataagaaataataatattcatagtattccatattgcttttcgtgtctaagagttgctaatttaatatttgtatatgtattaccatttaccaaaaaagatgatgaatttattgatatacaaaggttcggcgaattttttaataaaacactttttaaaaataaagaatttatattcactaaacaatttaatgatgattctctatattatgaaaaaattgtaccaataaaaaagaagaattaattacctttgggtttttaatttaaattgaaaagtctaagaaataatatgtattttgttactatgtcacagcaaaaaaaagtcgtgtcaaaactgctaaagtcgtgtcacggaaaataaagttgtgttaagtatgtagaaagactatgcaaagaagaatggagcaatcctcttcaagagcatagtcttttttgcgtgcttggaaaaataaaaaaggagaaaagccagaaataatgagggattgagcaatgtgaaatagagcgtaaattttaagcagcattcgcatcggcggcagccatgagtagaaaactgcagttaatttaggctctttgtgacacaactttattttgctaatcggggtgggttatttcttttttttattccgtttttattcttttttaacataatataggcaagaattcttgacacgactttatttaacccctaattttggaaaatgggggtgagcggagaggtaccaggggttagggcggtgttgggaaagtttttttcgtgacacgactttttttactaatacaaaaatcaaggttttactgagttaggtagactgttttaaatacgcatatctaatagagtttaatatctatggatgtgcgtatttttttatacataaaaagctactcccgtctataagtgtgtggaggtgtatcagaatgaggaaaataaacatgaaaactaaaggttgtgtcacagcaaaataaagtcgtgtcaaaacttctaaagttatgtcacgaaaaataaagttggtttgaaaattaatgaaagactatgcgaagaagataggagcagaccctatttaaatgcatagtatttttgtgcttgaagaaaaataaattatttgtcataaaaggtagttagtggtataattttaataataaattttaaataataattattatttgtatatatttaaattaataaatagaatagaggtgtgaacaatgagtaatttttttattaatatacttcttttgatatcagcaatatctttaggaggacatttatcgaaggatacaccccttgaatgcagttctaaaattttttcaaaagttttacttggcttaggtgggggaattcttgcgataggaatgatgatgtacacaataaatattgaaagtacaaaaactttggtggatttaagagttgtagcattaatgttaatatattatattggtggatttctgccttcattaattacaggagtgagtatagttttatttaggattatatattttggaatcaatcaatcatcaatagttgcaggttatcaaatattaatattactattatcatattcaatagctggtaagttgaagttaaacatggttaaaaagtgggtgacaatatacttacttagtatattgtcgataattagcacatattattacttgttgtttaattttggtgatgtatttaagatactcttggcgtatttgattatgtcggcaattgcagccatattagcttattatttattaaaatatgttaaatcgtcaaatgaattgtataggagatataaaaatgaggctactaaagattttttgactggattaaataatacaagacaatttgatttgatatttaataaaagtgttgaaaatgtaaaagaaaaggatgaaaaattatcttgtttaatgattgatatagatcattttaagtatgttaatgatacatacggtcatgcagttggtgatatagtactaagagatttggatgttattttaaaaaatacttgtagagtattcgatgcagtgtcaagggttggaggagaagaattttgtatcttattaattgactgttctaaagagcgggcgatggatataggaaaaaggatatgtgatgaagtaaagaagcatgaatttgaaattggtgacggtagaaagataggaattactgtttctgtaggtgtatctgcttacccggaattaactgataacattgaaacattattaagacaagcagatgactctttatataaagcaaagcaaactggaagagataaagtatgttcagttgatatatgtgatgaaatttaaataaaaaagttatatatttaaaataatacacgacacacatcatattttttgataagcaatttattgaatatgatgtgtgctatttttacgtccatttctaatggtgattttatgaaaaaactaaaaatgaattacaagaatgataaaacttttaatgatagcttagaaatgtttattttcaattatagattaagaaatttgcgtgtgtattgtagataatatttagatttgaaatatgcaatgacaatgagcgttaagaagacatttattcttagtgagtgaaaatttatttaaacttttgttagaaacaacttagtaaaaatttacaaactttcatatatttaaagatttataggaaacattgtttaaatgaaaatatgtttatatgttcctaggtaaatttattcatataaatatatttacctagaaacatagatacaaagaaaaatatatacatatataaatatttataggaaacatgcggtgtagaggtgaaatctcaaaaagatttttaaacaataactatcttttgaattactatttatgctaaaattatacataaaaggtatatttataaatggctgggacataagcaatagagatgttataaagtgagcttagcgggaggaaagaaaatggcttcgaatatagaatttgtagaatatgtatgcgaacagataagtggtgcaggaagcataacgtatagaaaaatgtttggagattacggaatctactgtaatcaaaaaataataggactaatatgtgataatcaattctttttaaagataacaaaaggaggcagagatttattacatgaagtcacagaagctcctgcttatgagggagcaaaaccatcttttttaattgaatctttagatgatagagagtatttaactgaagttgtatcagcaacctttgaagaattgccaatgcaaaaagttaaaaagaaaataaaagggaaaaaataataggggtgaggagtttgaaaaaggcgagagtagcagaaataacagcagaatttaattctaatataaaatcggtttgggatatagtaacaaataataatgattatagttggcgtagtgatattggaaaaattgaaatttataataatggtaaagaatttattgaatacactcataacgggagtgctacaaagtttattatatctaataaggatgaatatagtgagtatgcttttaatatggaaaataaaatgtttactgggttttggaaaggtagtttttcagaaacagaaaatggtggaactaaaatagtatttaaagaaaatgtctttattaaaaatcctattattaggattctttcatatttttttatggatttagggaaaatacaaaatacttatatttcagatttaagaaagaagctgggtgagtaatgaatattagagaacaaataattaaaaaatattttaaatcttggttagagaataactgttcagtattaaaagatatttttgatttaaatgtaacttatagcgaatgttatggtcctgaatatcatggaatagatacagttacaacatggtttaaagaatggaacaaacgtggaaaagtattggtttgggatataaagcagtttattcatcagggaaatataacagtagttgagtggtattttaaatgtagctatgatggagaaattgaagaatttgatggagtatcgcttattgaattcaatgataataattatatcgtaagcttaaaagaattccaatctaaaattccacattattatccttatagtaattaaattatggtttatattgataagttacatataaggagaagctatgaaaagttctgaagggcagcttaaaaatagagttgtatgcaactatagagtagataaatgaatatattaatttaaataaagattaattactagaattattgaaattaatctttatttaaattattttttataagttgttgacacattcttcctaaaatgctattctaaccatagaataggtgggtggaatgaatatgacacaaattgaggtgatacttttatcacttttatatgataaagattattatggatacgaatttgaaactgtaatagaacaaagaaatatgagagggtggacggatattggattttcgtcaatctataattctttgaataaacttgaaaagaaaggctatattggttccagatatgaaaaagaatatggttcgcctaagagaaaagtatatttcataaaagaaggaaccaaagtaattattaggaatcagattataaaaatgataagcgaatataagaatgaccctagtgaatttgatataggtttattattttcttatttagtgaccaaggaagaatttaaaaaggctttaattaaccataaagaaaatttaaaagatagaaaagaattcttaaataaaagatataatcagcatcctacagcgaaggagagaccacatataaaagcattgtttgaaagaccaatagcatttatagatactgagatttcttggattgaaaactttattgatgaaaatttttaggcaaagctcattataatgggggtggtttatatgggaaataaaaaagttttacaaattgttttttcaagcgtaatttcagatgctggggaagtaacacgtgcaatagaaatagcagatggaattagacgtttctgtccagaagattatgaagtagatataacttttttatctacaggaagtgtttttgaggataaagtaatttcaaatggatttaagatttacaaatgttcaccatcacttccgggaaggggatttcgtgaagattttaaaactaaaggcagtaatataataggagatgtaaagcttgcaggtgaattgctaaaaggggagatagatgcttttaatgacttaaaaccagatgtagttatatatggatttaatcctatagcaggccttgctagaaggatgactgaaaagccaataccaggaatttgttatatgccgatacctatgcaaaaagacgtatatcttactacgttaatgaaagatgccccggacaatattaaacctctgacataccttcccttaaattttcgaaaaagtattatgaaattaattcctaaagcaataaagctaaaagtaccagcttttgttcaaactaatattatcgaagcacttaaggaatttcagtggaatggaactccagttaaaacagtgtttgatatgcttgaagcagatttgacaataataaatgatcttgaagaatttaataaagagcataaacttcctgataattttaaggttgtaggaccattatatgcatcagcatcaagtaattcaaaaatagatgacaatattttaagaacttttaattcagagaacaaaaaaattaaaattttctgtactcttggaagttctggaaaaaaggaatatttatttgaagcaataaaagctctcactcaaggcataggaaaggaatggagcgctgtgattttggcacctaaagctgtatgtccaattaaggaagcaatcgaatgtgcgggaaatagccctaatgtttatattacagatgaatttgtgccagcacctttggtaaatggacttgcagatgtggtcgtatctcatggtgggcaaggaacagtccaaactgctattgcaagtggtactcctattgttggatttgcaatgcagccagaacaacagataaatcttgataatgtagtaatgaaaggtgctggaatacgaataccaattaacagatggaatgcaccaaacatacaattggctataagaaatataattaaagacacttcatataaagaaaatataaatacattaaaaaaattgttggaatcctcagatggtaagaaaaattcagcacttgctatatgggattatataattaataagttaaattaaaaaaaatgattggaggataagagaatgagtgatatgtcatcagttagtaatgcatttaaaacttttatgaaagaggcgcctgagtatcaggagatatggatggagacagttcaaaaattagattcagtaagtaaacttgattcgaaaacagaggaacttgcatatattgcagttttagcgtcttcaagacttgaaggcggtctgcctttccatgttaaacatgcaaaatctcttggagcaacaagggaagaaataataagtgctgttttaatcggattaccagccgtaggtaatatagtaattcaatcattaccaatagcaattaatgcgtatgatagtgaataaatatggagaatttattttagtttcaagtattatttttatagaataaaataatattatattaaaataataatatttataaaatattacaggcaactagataattttttaacgaatattttatgtaaatttagattaataatgattttagacgacatataattacagaataattgatgtattttgttataaaacatcaatatatagatgaaaatgtattacgaaaatacgtgaaattatgttggaatatggtagaatataagtgggtataaaaatagggtataaaaaatatggtttgtgagagatggtaatcaccaaaaaaggctgagtagttaatacttaagcctttttttgatattgaattatatgattgtcaaatatttaacttattatatgaatatagagcgattttgatataaagaattacaaaattcgtcatggaattagagtgttacacaagtttattagaattattagttttatatgaattaaatatataataaataataaaaaggataacttgtttaagggaatcaagttatcctgaatactgatttgttgtatatttatttaataggagaacaattaatatgaattgtttataatattataataaaggataattgtggcaatattatgtcaattaaaaaaagatttctattaaaattattagaagattaagtactagtatactttattcaaataaaatgaaaatagtgaataaattgcataattcaacaaaatatgctatcatatatttatgatatgtatagagaataattactatgtagatgaggagtgtgggtattttatgaatataaacaatgaacttaaggaagttataaatgataaattggagagaaattctgaggttgaatttatcgcaggattgaaagatataactttatctgatattgattatattgagaagttatctgcagttaaaaatttaaaatcaaaattaaattatcaaattgtggataatacatatataaaaattgattgctcattgtaaaaatatagagttaaatattttagctaattgtatataagaggtagtattttgttatgtgaatattataataaaagtatttaaataacataagaaaatgatttttacccctataggatagaaaattaaattttatcctataggggtatttagcgttagtagctttatccgttttcttatctattgtatattttgtttaattaatcgcataactaaaagctgcgtgtggaagaatatatttattagaaggaagttaggaggtgaatttatggaaaagcaacatctggcaccaaatgagacaatgcaagttcatgaaatgctaaacttcaaaactatctgcatgactacatcaaaaatgatggaaggtgtagtttttgatcaagatctaaagtcattgttagagaaggatgtacaacaatctataacagcaataagtaacttacaaaatttattgaaaaaagctcctaaaataagatgagaattttatatataaattgtttttaaaaatgctagaaaacaaaggagggaaaattatgattaatgattatttagaaataagaaatgcagagggaatgcctaaacttgtggatgcaaatatgtctctaggttttttattaaatgccaagagtggtgtaagaaattgtgcaattgcattgactgaggcgacaactccagaagttagaactgttctaaagaatcagttaaatgatgcgattcttatgcatgaagaaatatcaaatcttatggtagaaaaaggttggtttcatcctacaaacctagaaaagcaatttcaaatggatattgaatcatctacaacaatatctcaaattgctagtttggatttatttcctggtgacacaagtagaagtggtatgtttgcaacactagaaaaataaaaaaggaggtaattatttaatgaaggctgtaacatttcaaggaataaagaatgtaaaagttaaagaagtcaaagatcctaaaattcaaaaggctgacgatattatcgttaagcttacaagtacagcaatatgtggttctgatttgcacttaattcatgatatggttccaaacttaccacaagattatatcataggacatgaacccatggggattgttgaagaggtaggaccagaagttacgaaattgaaaaaaggtgatagagtaatagtgccttttaacgtaagttgtggagagtgtttttattgtaaacatgatttaacatgtatgtgcgataattcaaatcctaatggagaaaatggaggattttttggatattcagatacatttggaggatatccaggaggccaggcagagtatatgagagtgccttatgctaattttactcctttcaaaattccagaagattgtgaagtagaggatgaaaaattattattgatgtcagatgcaatgggaacagcttattggagcgtagaaaatgctggggttaagaaaggtaatactgttattgtgttagggtgtgggcctgtaggactgctagcacaaaagttctgctggatgcacggtgcagagagagtaatagctgttgactatatcgattataggttagagcatgcaaggaaacataataaagttgaaactgttaattttgaacaacatgagaatacaggggaatatctaagagaaatcactcatggtggagcagatgtagtaatagactgtgttggaatggatggaaaaatgacaccaatggagtttttaggatcaggtttaaaactccaaagtggatcattaggtggatttgttatagctactcaggcagtgagaaaaggtggaatgattcaagttactggagtttatggaggaagatataacgcgtttcctttaggagatataatgaatcgtaatattaatataagaacaggtcaagctccagttattccatatatgccaacactttataaattacttgctgaaggaaaagtagatccaagtgatattattactcacagattgccccttgatcaagcgccatatggatatgaagtatttgatacaaaaactgacggatgtattaaagttgttctaaagccataggaaaagtttatttattaaggagggtaaaaaatatgaatgatcaaagtattgcaccaaatgaaactatgcagttgcatgaaatactaacattcaaaaatacatgtttaactaaagcgcttactatgtcaccattagtttcggatgaagaattaaaatcaatattgcaacaagaggtatctgtatcagaaaaacatattgaagagttgagaagtcttatggagaaatctaatattgcatcttcagaagaataaatatttaattttagaaaggagagggaattatgaatggattaatagaaagtcttacaggaatgagtaaaatgactgatcaagttatagctactgactttttaatttcggccaagagcggagtacaaaattatgcagttgcgataacagaatcaatttcattagaagttagagctgtattaaagaaacaattacaagatgcaattcaaactcatgaaaaaatatcaaattacatggtggaaaaaggatattataatgcttatgatttaggcgagcagtataaggtagatatggaaacaacagatacaacgttgagtcttacaaagaatttaaagtgattcagagaacatatgcgactcaacataataaaatatgatagaaaaaaagaatgacttatttaggggaataagccattctaaaatactatttataagtatttttaaattagggttaataataatgctttaactactttacaaatattattataatagatttatgttacagaaatgttacagaatgataaatttattataaataatcaataaaaagttgattaagaaaattaaaattttagcaataagggggagtacaactgatgtattcgcatgagattgactataaggtaaaaggtgacgatatacaatatgtagaaatcgagcttgatcccacagaaactgtgatagcagaggctggagcaatgatgatgatggatccaaacatacaaatggaaactatatttggagatggatcaaaacaaagtggcaacagttttatgaataaaattttttcagcaggaaaaagagtgctgactggagaaagtttgtttatgactgcattcacaaattcgggagcattaaaagaaaaagtttattttgcggcaccttatccaggaaagataattcctatggacttgagtttattaggaggaaaattaatatgtcaaaaagatgcttttctatgtgcagctaaaggtgtatctgtaggaatagattttaagaaaaagttaagtgtaggtttttttggaggtgaagggttcatactcgaaaaattagaaggggatggcttagcttttatacatgcgtgtggtgcaataattgaaagaaacttattgcctggagaaacattaaaaatagatactggatgtttagttgctatgactaaagatgtacattatgatatacaatttgtaggtggaattaagaatacgttatttggtggggaaggagtattctttgcaactgtaacaggaccaggaaagatatgggttcaaagcttaccatttagcagacttgcagaacgtgtatttgcagcagctccaacttcgggcggaaaaaatagagaagaaggtagtgtacttggaatgcttggaaatattttagacggagataattagaaggaaaattgatttatattggtttatatatgatgggagtaacataggttatttatgattcaataacttatgttattttttttattctttaggaatttatattccaataaaatctgtggataacttaaaaaaggttgattgactagttttggtattttaaaaagaataaaaaagaaatcttattcgcctgctaaatttttctcacatgcgttcgaaaaggcagatgcgtgaaaaaatctcaggctccacagtcgcctgcgattttgttcttaaaacaattagaagtttgtcaccaattagggttaaaaactatatctttatatattataattaagaagggataaattaggtaaataataataagttatataataaagaaaataaaaggcactttacagttgataatcattatcatataataagtaaaagaaaggagtggatctatatatgaatgagaaaaataaagatttaactaaaaataaattaatcggaaaagatctattaaaatatattggaccaggaattttagttacagtaggttttatagatccaggaaattgggtatcaaacattgcagcaggatctaattatggctataagttgctttggattgttactctatcaacaataatgcttataatattacaacataatgctgctcacttgggtatagtaacaggattatgtatttcggaagcaattaataaacatataaataaatttttaggacgagcaattacaataacagcaatgttagcagcagtaagtactgctatggcagaaatattaggagcggcaatagctttggacatgttgtttaatattccattaaaattaggtgcattaatttctgcgttagtaattacatttatgctattttccaattcgtataagaaaatagaaaaagtaataattggatttgtgtcaattataggaatatcatttatatttgaaactttcttagttaatataaattggggagaagcaatacgtagtgcagttgtacctagtattccagtaaattccctaccaataataatgagtgtattaggggctgtagttatgccacataatttatttttacattcagaagtaatccagagtagaaaatggaatttaaaagataaatccatattagagaggcaattaaagtatgaatttatggatacaatgttatctatgataattggatttataataaatagtgctatgattttagttgcaataacattttataataataatgttcaggttaccgaacttgaacaagctcaaacaatgttaaaaccattgcttggaaattcagcttcgataatatttgctatagcattgctttttgctggattagcatcatcagttacagctggcatggctggaggatcgatatttgctggtttatttggagaagaatatgatataaacagtaaaagcagtaagattggagtattaataactatattggttgccttagttataatattttttgttagcaatccatttgaaggattgctttattcccaaatgctattaagtgtacaattgccaataacaattttcacgcaaatatatttaacatcatcaaagaaagtaatgggaaaatataaaaacactacattagaaaagattgttttatggagtattgcaggaatagttactattttaaatattatgctattagtaagttcgttttaaaacaatttagtaattaatagttgaaaggggagcagttatgctcccttttccattttggggaaactgctcattaaggaaaaggctcgataaagtataatgaaaatagttttattttgtagtaaaacaacttgaaaagtatggtaaaattagaattaaataagtattgtagaaataataatttctgaaaggaactgatattaaatgaaaattttagcatatagtcataggcgtgacgaaacacagtattttaaagaatttagtaaaaagtataatgtcgaagttgttttatgtaatgaagaaccaaatttagaaacagcacctcttgcaaaaggttttgattgtatcagtataattacaacgaatataaactcagaattagttgaaaaatttcatgagttaggtgttaaatttatatcaacaaggactatagggtatgatcatatagatttgaaaaaggctaaggaacttggggttcgcgtaggaaatgtaacgtattcaacaaatagtgtagcagattatactataatgctaatattaatggcaattagaaaagttaaacttataatggaaagaagcaatgtgcaagacttttctttaagaggtattcaaggtaaggaattacctaacttgactataggtgttgtaggtacaggaaaaatagggaggactgttatcagtcatttaagtggttttggttgcaaaatattagcacatgatatatatataaatgatgaagtgaaatcaaatgctaagtatgtagatttggacaatctatttaaatatagtgatattataacattgcatatgccggctacagatgataattatcatatgattaataagaaagctattaaattaatgaaagatggagtctttattattaatactgcccgtggatcattaattaatacaaatgatttgatacaaggaattgaaagtaagaagataggtggagctgctttagatgtaattgaacaggaatctaatatttattatagcgatctaaagggagaaactttaaaaaatagaaatttagctattctaaagtcttttcctaatgtaataataacacctcatgcagctttttacacagatcaagcagtaagtgatatgattgaaaattcaataagaagctgtatattattctcagaaaataaagagaatccatgggagataaatatatagcattataaatataagttacaatacataaatctctctttcctgctaaaactattaatatttcagattaataaaatagtaaggagatatgaaatatgtttgataaaattcaattaccatatgcatttgatgcattagaaccatatatagatgcagaaacagttgaaacacactatagcaagcatcttcaaaaatatgtagataacttaaattcgcttataaaaggctatgagcagtatacagaaggtaaatccttagatcagttgttagcaagtgtgaacgaattgccagaagaaattaggcaaggagtgatagatcaaggtggaggagtatcaaatcataatttatattttgcacttctttcaccaactccaaagaaagccccagaaggaaagctattagaagaaatatataatacatttggagatttagacactctaaaaactgaagtgagcaatgctgctataggccaatttggatctggttatggttttttggttaaagacaaagaaggaaaattatcagtaaggaatacgttaaatcaaaattcacctgcaatgaatggatttgttccaattttaactatagatgtatgggaacatgcttattatttaaaatataaaaatctaagagcagactatgtaaaaaatatatggaatttaatagattgggaaaaagtagaaggcttatatttaaattatacgatttaaatacttttaatgataaaaagtaagactagagagttgaattatttctctagccttattgtacattttaagaaacagatgaagtttattttctagctaatacaatgaatcattataaaaataaggtttccaattgttataaatcttttcactccttatgcagtaggtaatgtcattcaagtttgaaagagaatctaaaaggtcaagcttgctgctaaaggaatcagagaaagctttaagagcatcaggaattgatttagcagataaattaaaagtttcaagtggatcagaatcattatcaccgtttctgtttaaagatataattttataagcatctttacttgcttcttctactaattcgtttatatctctttttaaatttatatcatattcgcttggataagctacttctaagttaattctataacaaatatttctagcttttacgcaaggcatttcactagtaatttcgttatcatccaaataacctactgttttagttacaacatcttctttgatattaggtatatcgattgatgctaaagttttagtgtaaacatctctggtaccatttacggaatattctttttcattatttagcaatgttgttgtatcatttctatttaaatctaggcaatcattgcatttttcttctgattcagaatcagatctatagcatatgaaagaatctattcttcttaaatctaatccgaaatagacccaatttctacggaaccatctaaaaccagatactgtacgtctgttaacacttaataagaaagtccaatagttatttccattcttttcctagatatatgtgtatttataaaggcaaaatcttatagagttagaactaacagctttaacatttacaccaccgctagctccgactttttgaactccagaatcattttttcgtggtacataattaggtggtggagatttaggtgctccaggaggattgaatacaccaccgccagggtaattaaaatttggagaatcatcatagtcaaaattaggcggattaaaattaaaattaggtggatagtttcctataggtggaaaacctccactatttggtgtaaaaggtgcacgttttttttcagcagattcatctaaaattggtgaaaattcaaagttatgaaagtcttgaaagttcatagtatcgtcactaatgaactcattatcaattaacatttatattttactcctcagaaattagttataaataatatattcataagagtttcagattgttataatttacgttaatataatgtttatatttttatatgatttaatatgctaatagctaatttcaaaatcaatataagacgtattaggtaatttttcatctacaatttcataggctaagtttatccaactttcacatgtattgaggattatcccgtcgctagttacaacatgatccaatttatttagaatgacatctgcatttgaaataagaataacttctatatcaaaattgtatttatgcagaatttctaatattcttgatttcaatcttcctgtattagaaacaggagagtcaagataaaagatagacttacgtatcttcatttcatctaatcttttaccaatcaaatctattgctgtatccgttttatcaattaacttatatgttccacgaagtccagctaaatcgcggagagttccgtccatacatttaattagtgttgagttagacaaagctacttcaagagtaataattatattaagaccatcaatatgtagcgtgctattttcgtatttatctaatattttacgcttctgcctgctaataatatcttcgtaagaagatatgcttctttttaaagctaatctttgcctagcagaaaataaaaggtgatttcctacaaattcaacacttttatctatactatacccttgatttattaagtaatagatatccttttgagctttttttaataatgttaggttttcttcattaaattcaatttcgtcagatggaacaaagcctcttttaactatttgtgtcatataaatatacctcctaaagtagcatctatatctatataattattaatatctccataaatataccttgaattataacatacttatgtaaaaataatacaaataaattatacgtgatataatgaaataattacttttatggagagtatagtagaggggagttaaaaaatatagctacagaaattctgttgataggaattattcctagatcagaaatctgtagctatattatcattaaataaagtggatacaacctgctgcttagaaccttcagcgatattttcatagattttcggaacaaaatatttatgatttcggtaagttaccacataaatttagttttagatttatactatgaaatatatcccaactagaaatgagtaatatatttttgtggaattaccaagaaactggaacaaaagtatattacccatttcggtgagttatatgcataagttcaggttttagttgagttatctataagtatataattaacaattagtttaattaaaatctaggaatgtctaagatagcacctctatttcctgatgtaacaagagcagcatatcttgctaggtaacctgtagttatttttggttttcttggtttccaatttgcttttcttcttgctaattcttcatcgctaactaagaagttaatagtattagcattaatatcaatttggatgatatctccatcctcaactaatgctatgttaccacctactgctgcctctggagaaacgtgtccgattgaagcacctctgctagcgccactaaaacgtccatctgttataagagcaacggagcttccgagacctcttcctgcaattgcagaagttggattaagcatttctctcataccagggcctcctttaggtccttcgtatcttataacaacaacatctccttcaacaatttttcctgtatttatggcttcaagtgcatcttcttcgcaatcaaatactttagctggaccttcatgctttaacatttctggtacaacagctgaacgcttaacgacacaggaattaggcgctagatttcctttaagaactgcgattccaccagtttgactatatggattttcgactggtctaataacttcaggatttttatttatacatccttcaatgttttcgccaacagtttttcctgtacatgttataaggttagtttttaataaaccaagtttatttatttcattcataacagcgtaaattccaccagcgtcatttaaatcttcaatataagtgtgtcctgcaggggcaagatgacaaagattcggggtctttgcactaatttcattagctatatcaacatttaaatcaaagccaacttcatgtgcaattgcaggcaaatgcaacatactattggtgctacatccaagagccatgtccatagtcatagcattcataaatgcatcttctgtcatgatatctcttggtcttatgttcttttcaagtaattccatgattttcataccagcatgctttgcgagttttattctttctgaataaactgcagggattgtaccatttccttgaagccccataccaagtacttctgttaagcagttcatactatttgcagtatacattcctgaacaagaaccacaagtagggcatacgttattttcatattcatctaatttttcagctgtaatttttccagcattgtaagctccaacagcttcaaacatacttgataagcttgtcttacatccgtcaacttttccggcaagcattggtccgccacttacaaaaattgtaggaatattaactcttgccgcagccattagaaggccaggaacatttttatcacaattaggaaccatcactaatgcatcaaaggcatgagccattgccatagcttcagtagaatctgcaattaaatctcttgtaactaatgaatatttcattccttcgtgtcccatagcaataccatcacaaacagcaattgcaggaaagacaattggagtacctccagccattgaaactcccatctttacagcttcaactattttgtctaaattcatatggccaggaacgatatcattttgtgagcttacgatacctacaagaggcctttccatttcttcttttgttaaacctaaggcactaagcaatgaacgttgaggtgcacttttagagccttttgttattacatcacttctcatagcatattctccttacatatatttataattatcgcgttgtatgttctaattataagttgtatgatgtctgttgtcaattacaagataagattaaaataaaaagtgctatttctataaatataaagaattagcactttatcttattcatttggtatacctaaatctttcattgctctaataatatgaattttcatggcagtttttgcgccttcagcatctctagcctccagaaattccattatcatgcgatgatcatttaaagtattttgaagaattgatttattttcatcggataaaataacaccattatcaattgctttatataatataggcatcagcttattcataaattcattatgagtggcttttgcaatagatttatggaaggatctctctacctcggttcgatcttcgttatttaagatcatttcttcttcgagtcttccgtaatataatattctttctaattctttatcagtagcgcgtttagcagcatagtaggcagtctcgggttcaaaaattaatctcatttcatataaatctttaacatctaatttttgagtagaaagattctctaatcccatgctttcagtaatattttttatttctgatacaaatgtgcctttgcctcgcctaatttctaaaatattgtgagcaactaaaatacgaatggcctctcttagagtagttctacttacttttaattcagtagaaagctcattttcatttggtagtttatcaccaatattaaattttttatctatagtaatcattgctagtatatcatcagcaacactttctgataggcttttttcttttcgtagcataaacaaacctccttttaggttatgtttatataatataataaaaaagtctagctttcaagagtgatgtctgatgtcttatgattaaagattcctataaatacaaaataaagctcgttggagcgattccaacgagcacataaacaaaattagatttggttttctgggataaatgtagcgcagtctgtttcttgagtgtcgctagcatttctaggttgcacttctatttgttgtgcacaacagtgatcacctgacatataatattgacatgtattaacaacacatttgattccttggtttggtgagtccattttttctggtttcatagctgttacctcctaataatattattttaattaacaataatattattagttaatagaacttttttatacgaaaaaatataagttatatttttcaaaaaatgactaaagatattttatttgttattttaaaaatgtattttttatcttattgtaccactaattgattattgatacgattacatgattatagtaatatatagttaacaagtagattagggggaggtacgtatgacatttgtaataataacagtatttgtaatttattcgatggtacgtaaaccaagtaccgcatccaataaacagaaatagattttaatacaatcaaaattgtaaattttaataaaaagtaaatgcaaatttaatagtagaaagagtagtttaaacgctgctctttttttatgttaaggaataaagtatgtaattaataattttacaatgaagaaattctataatatacatatataatggaaaaataaatgctataaatttaagttagtaatagcatataaataggaatgacaattaagctaagaatagttgttatgattgtatttaccgtagcatactcataatctgcattatatcgtttagatactattgctgtattagtcatgactggcattgcggcttgaataacaaatacttctttcataagtaagggagtatttgcaaaattgcataataacaaaattaatattggagaaatgataaaccttcctaaaattattgctagcatgtcccaactaaatctaaattctttgaaattaacagagtgaattgttatccctataaacaacatagctaatggtgttgttaaattgccgaaatatttgcaagtatctagaacaaactttggaagatgaatatctagtaatataagtaaaacagcaaaagtaaagcttaataaaggaggtgacatgatacgttttattgtatcaaaggaaaagatattggcattggtagagtcgccatcacgactaatttcatatacaccgagagtccagaaaaaagtagtatttgctatgtagtataataacacgttcgggatacttttttcaccaaataaagccatattcaccggaaggccaataaatatagaattagatacaaaaaacattgatctaaaggtaccaattcgtttcttttccactttaatagctttagaaacaattacggcaattatataaccaatagccatggaggtaaatggcgcgaataatccaccaccaagactcaatagtttctctttatcaaagctttctgtaaattgtgaaatcatgaggcaggggatagcaagattgcacactaatcttgaaaaaagctttgaagttttttcatcaaaccagcctttatgagataaaaagaatccagtagaaatcatgagaactatactgaatacacttcctaatgcattaaaaataaccattataaattctcctttaatatattttttaactaattgaattaaagaataatggattacactttgacttatataatgcaatcctttgataaaatgtttttcaaatgttttaaatcattgtctatgtggttgtacatagctttatatgctttttcttcatctctctttttaatataatgaaatatctcaagatgatgattgaaaatatccatattacgctcaggttcataaacatctatagatctataaaaataagtgagagaactcaaatctttactcaatttttttagatgattattttggctgaaatctaagattaaatcatgaaatttagtatttagttcaataatacttttagtaagtgtatcatcaaagctttctatgtttttttgaatttttactaatattttttcaatttcatctaattctttattagatgccttaagagtagttaattttgcagcttgagattctaaagcttggcgacattcataaatattttcgatgtcttctttggttggcttataaattgtaatttttgatttatctccaataacaagtagtccatctttttctaaagaacgtatggcttctctcactggacttctgcttatttgaaattcgctggcaagtttggattcataaatcctatctccgggttttaaaataccgttaaatatcatagcttttatagaattataagcttgatcatagtaagaaggtgctttttcaattttatatttttccattactttatcctcctatagattgtgttaaaacgattaattaatttcaatatttatacaatgtatactgtcgacaaattaattttagtataatctacaaatacaaaataatcaatataattgaaattaaattatacaaataaataaaaaacctggtggattaaatttgtaatctaccaggtcagataattatattagtctattttatttatcttcttctatggtgttttttatgttcaactagatcgatagcgccaagaaccatgtgagctgcgccaaacccaacaactccagcagcgataactggtgccatttctactgccaccatagctgcacctacacctgttacaactgtacctaatgcagttggtattgctccttctcgaattctcatattcattcctcctttaaactaatagagtatagtaatactaatattttttaatttaagatttattatttgcattaataattttccatctaaaaatatttttatactaaataatgatttataaaaaatattaaattatctgatttataaattttatttatcttcagtttgcttattatatgctatgaggcatactggaggattatggtgttcatttattctgttttccatttgtcttatgaaatatatatcttctgtagataaatcactgaattgattatcaaatttattactatcattactcatatcatcactcctttcataagtatagtatggataggtggaaagattttaatctgaaaataataaagtaataagctttttattatatgtattatatcagtgtatatattttttcagcgtggcaaagataattttaataaagtataaaaggagtgttgtttatatgttatctacaataaaagccaacaatttaataaatgaaaaatctccttatttattgcaacatgctaataatccaataaattggtattcgtggagtgaggaagcatttgcaaaagctaaagaggaagataagcctatttttttatcaattgggtattcaacttgtcactggtgtcacgtaatggctcatgaatcatttgaagatgaggaaattgcagaaattataaatgatagttttattgcaattaaagtggacagagaggaaagaccagatattgatagtgtatatatgacagtttgccaagccttaactggccatggaggctggccgcttacagtgataatgactccagatcaaaaaccattttttgcaggtacttattttcctaaaaaggctaaatataatatgccgggacttatggatattttaaattcaataaataagcaatggaaggataataaggataagcttatatcatctggtgataatattttatcagaacttggcggctattttgagggtgaaacaagcaaaatgaagttgacatccaaaacattaaaaaatggatataatcaaatttcacacgcttttgaggaaaagtatggaggctttggtgatgcgcctaaatttccgacacctcatataataatgtttttgcttagatattataaatctcataaagaaattaaagctttagaaatagctgaaaaaactttgatttctatgtatagaggtggaatatttgatcatataggttttggtttttcaagatattctacggatagtaagtggttggtaccacattttgaaaagatgctttatgataatgctttgcttgtcattgcatatttagagggatacgaggtcacaagaaatgatatttataaagaggttgcaacaaaagtgctagaatatgtatttagagaacttactagtaaagatggtggattttactgtgctgaggatgcagatagtgaaggtgaagagggaaaatattatgtgtttgaacctttagaaattctaagtgttttaggagaagaagatggtacgtattttaatgattattttgacataacttctgatgggaactttgagggcaagagcattccaaatttaataaaaaataaaaactttcgtaagtcagatgataggataaagttacttagtgaacaaatacttcaatatagaagtgacagaacggaattacataaagatgataaaatcctaacttcatggaatggacttatgatagctgcacttggaaaagcctataaagttattgaggatgaaagatactttgaatatgctaagaaagcagtagagtttattttcaataacttgatcgatgaaaataaaaggcttcttgcaagatatagagataaggattcgcgtcataaagcttatttagatgactatgcttttctttgttttggacttatagagctttatgaaagtagctatgatattgagtttttaaataaggcgattgaaataaataaggatatgattaacttattttgggataatgaaaaagatggattcttcctttatggtgaggatagtgaaaaattaattgctagacctaaggaactttttgatggtgctatgccttcaggaaattctgttgcagcttataatttaataaagctcgcaagacttactggagatttaactcttgaagaaatggcagagaaacaatttaattttatctgtggatcagtatttaatgaagagataaatcattcattctttttaatggctgcatcatttgctttaaatgaatcacaagaattagtatgtgttactaatgataaaggtgaagaagaaaaaattaaagatttattaagtgaaagatctcttttcaatttaacaacaataattaagaatgatgaaaatagaaataaaatagagaagctagcaccatttcttaaggaatatgatcttataaatgaaaaatctacatattatttatgtaaaggaaaatcgtgtatggctccagtaaatgatattgatgaattgagaaaaatgttatctaaattataaggagatgaataattaatctaaaattaagatttatttaagttgttataagaccgagttttagtataataattccaaggagaggataaatttatgataaatataagcaatataacaaaaagttataatggaaattataatgcggtaagcaatttaaatttggaaatcaaggatggagaaatatatggattattaggacctaatggggcgggaaagacaacaactattaaaatgataactggaataatagcgcctacatctggaaagattgaaattaatggaattgatattagtaaagagccagttagagcaaaagagcaatttggttatgtcccagatagtccagatgtgtttttaagattaagtggaatggagtatttaaatttcatggctgatgtttatggggtttcgaaggaagacagattattaaggataaaagaaatatcaaaaagattcgaaatggacttggcattaggcgataagatacattcatattctcatggtatgcgtcaaaagatagttcttatgggagttttgattcataagccaaaagtttggatcttggatgagccgatgacaggcttggatcccaaatcagcatttacattaaaagaaatgatgagagaacatgctgatgaaggaaataccgtggttttttctacacatgtgttggaagttgcagagaaagtctgcgataaagtagcaatagttaataaaggacaattaatatttaatggaacactaagcaatatgagaaaagagtttaaagaaaatgaatccttagaagaaatgtttttggagatgattcaagatgaataggcttaagataataacaaaatattttgtgagaaatgcatttgaggaaatgtttgctagtggtaagaaaattaagcctgtttttgcggtaatgctaatgatatttgttgttgtcatgctctctatgccttttactgtaatgataggtgaaggttatggaccacttcatgctatgaggcaggaaggaatattattatcaataatattgtcaattggggagagtgtttccttcctctttggaatgtatacaataataaatatcctatacttttccaatgatattgaagtaatattgccacttcctttcaaaagtagtgaaatagtatttggaaagtttatggcagtgttaatcaatatgtatgtatatacgtcaatgttaattttgccactcatagtctatggagttgtgtcaaaggcaagtttcatatattatttatatggaattatagtgctattaataattcctattctaccaatggtatttgcatcattaatatgtatgattcttatgagatttactagtttatctaagcataaagatgcatttagagtatttacagggtgtgcatcactagtattaatagtaggatttaatatttttacatcaaattctggaagaagtacaaattcacaacaaatgcttcaaagattttcagatggtaataacagtttgatgagcatgctaaatgatatttttataacaagtagattttctgccaatggcctattatataataatgatattagaggtctacttaatatacttatgtctataagtttaagcttaatagtattcatagtatattactatatcggaggaaagctatatttaaaaggaataataggaatttctgaaacttatagcaagagggaaaatattttagaaaacgggaaagcagataaggtaataaaagaaaattcaaaattgaaagcgctaatcataaaagatattaaaattttattcagaactcctcaattttttattaattgcatagcaatgatgttttacatgccagcagtaatgggggttgcatttttttctggtggtaaactatcggagtataggtatatattaaatagtagtcccaaatggaatgcgattaccatagcaattgcatttgtaggtggaacggtatgtataatgtcaggtggagcaggtgcaagtgcactttcaagagaggggaaagattttattgtatctaagtatattcctgtggaatataaaactcagctatactctaagattctttcgtcattatttataaatgaatttgggatggttatagttgtcttaggactcttattagtaaacgtaagtcctatcataacattgctcggaacaatatcttcatttggatcaatacttatggtaactttattgggattatatatagactttagatcaccaaaattggaatgggaaaatgaaaaagcaatgtttaaaaataattatatacctctgttaattatgcttattatatttatattaggagctggtttagtagctgctgccataattctgaggaattatgtgattatatttggaatttgcattattatttcacttgttggaagtggtcttttatataaaggtttattaaagaatgcttttaaaatatataatgaaaaatagacagaataagatacaaatgcattacaaaaattcgctttttgattttgtaatgcattttttattaaagtaaattggtaattgagaaataaaatgaatgtatgagaaacaaattataataaaactgctgatgttacaaatagtaatattaaacaatagacttataacgacattttgaattaaagttaatttgacactaacttagtgtaatggtataatggtttacagagtgtgaaggtcacacgaaggggtacaccaccttgggtgtattttttcgtgtggccttttttagttatattaaatatttaagaggtgattaaatggtaaaagtgaatggaaaagaggcagataatgcaattggattatcgttagaggactttcttatcagtgaaggatatttaatagataagattgtagttgagctaaatggtgaaataatgccaaaaccccaatataagcagacaaatattaaagatggtgattctttagaagtaattagctttgttggaggaggctgatgcgttaataaattcagaaatatcactaatgtatattatcaacaataaaaataataattttactgcaagatctagattagaaaaggacaagcttttaaattaagttatttatttaataatttggttatacatattaatttattttaataatcgaattttatatactgctagttcttgctgaaaaatgctaaaggagagtattggaatgaaaaaagatgtattaacacttgggggacatgaattctcatcacgattcatactagggtctggaaaatataatttgaatttaattaaggctgcagttgagaatgcaggcgcacagatgatcactttggcattaagacgcgctaatacaagcggaggtgaaaatattttggattttattccagaaggtgttacattgcttcctaatacatctggggcaagaaatgcggaagaagcagttagaattgcaagacttgcaagggctatgaattgtggtgactttgtaaaagttgaaataattcatgactcaaaatatttgcttccagataattatgagactattaaagcaactgaaattcttgctaaagagggttttatagtaatgccatatatgcatgcagatttaaatgtggctcgtgatttggttaatgcaggggcagcatgtattatgcctcttgcatcaccgattggatctaataaaggtttagctacaaaagaatttataaaaatattagtagatgaaatagatcttccaattattgtggatgcagggattggaagaccatctcaagcttgtgaagctatggaaatgggagtagcagcagttatggctaatactgcaattgcgacagctggtgatattccagctatggcaggagcatttaaacaagcaattgaagcaggacgtgcagcatatctttcaggactaggtagagttctagataaaggtgcttctgcatcatcaccattaactgggtttttagaagattaggaggcagactatgagcgaagaacgtataaatcacatggagtatatggctgggatggaagtattagaatcggatgtaatggataaagtaattaatcatatggaagcttatgattataataagtatacagaaacagatgttagagtagctttgaacaatgattatcgtaccatagaagattttgcagcattattatcaccagcagctatgccgtttttagaggagatggctcaattagctaaagaggaaacaagaaagcattttggtaattcagtttatatgttcacaccactatatctagcaaattattgtgagaactattgtatttattgtgggtttaactgtcataataaaatacgcagagcgaagttaaatttcgatgaaatagagaaagaaatgcaggcaatagctaaaacaggtttagaggaagtgcttctgcttactggtgaaagtagaaaaatgtcagatgtaaaatatattggagaggcttgtaagatagcacgcaagtattttaagatggtaggattagaagtatatcctatgaattctgatgaatatgaatatcttcaagaatgcggtgcagattttgtaactgtattccaggaaacttataattcagataaatacgaaacacttcatcttgaagggcataagcgcatatttccatatagacttaatgcacaggaaagagctctgaaaggtggtatgcgtggtgttggatttgcagcattacttggtctagatgactttagaaaagatgcttttgcgacaggtgtacatgcatatcttcttcaaagaaagtatccacatgcagagatagcattttcatgtccaaggctaagaccaattattaataatgataaaattaatccaaaggatgtgcatgagaaacaacttctgcaagtcattacagcataccgtctttttatgccttttgctaatattacgatttctacaagagaatgcgaaagatttcgtaataatgtaattggcttagcagctactaagatttcagcaggtgtaagtacaggaataggaagccatgcggaagatgcagaagacaggggagataatcaatttgaaattgcagataacagatcagtagatgaagtgtacgaagcaattaagtctaaaggcttacagcctgtaatgaatgattatgtatatttataagattaataagatgtttatatctttaaacataggcaaagatagataagttgtaatctagatatatcttaatactgaaataatttagtaggaatctttaattgattcctactttttttagataaattattatactaattatagtttgacttatacataataattataaaataaagattatttatttttcgcttgaagacccaatataattacttcaagatagcctgcaaaacgcgaaacaaaatcaggaggggcttcgagcagtgaaacagtttgaaattcttgacgttggtttttagaggatactgccggagaatataaactagaggcataataaatctgatattcattgaaaagtttaagctcatcgtctgttaggttaggaataaattttttagtaatcaaatttaatttaccaaagctattagcaagatcttgtttcaatatctccagtgattttgttgtcacattacttcttaatactgaaactaaaattgagaacagctttaaaaaacgctgattttcatacatttgttctgaccataacagacaaaaggttttaagttctaattgatcataatctttaagtttatcatatgttttttttacccacttttctaaatctgaacttaatatccataggaaaatttcttccttggtggaaacgtatttatataaatttgctcttgaaaaatttaactcattagcaattgaagcaagtgtgattttttctaaaggctctctttcatatagctttaatgtagcctctatgatttgttcacgcctaatgcttttttgttcttcgtttcgagcacgttgaaattccatttctttacctccttactaattgacaattacataatagcaaatgaattataaacttacaagttactaatgttactcaaaattcattgacaagttatgcagtgtaacttatacttaaataagtttcatggtgtaacttatattttcgaaatcgtagatatgataaaaagtcataaattaatgcgaagagacgtataaggaagttgaagtaactcagacataggagtaggtaaatgttttagcttatttaatgcctagtaatatgttaaataatggggtgagcaaagaatgaaagataatagtaatgaacaggcaaatccatggttagcaatgatagttatcatagttggtacatttatgtcggtactaagcagtagtataattaatgttgcattaactaaaatgatgtctgtatttggagtaggattggatgatgtgaagtgggtaatgacagcttatacattagcacttggagcaattattcctttaacaggatatcttcaagatatttttggtgctaaaaaagtatacatagttgcattggcaatttttacgatggggtccgcgttatgcggatttgcatggagcaattctagtatgatagcatttcgtgtatttcaagctattggaggagggatgatgcagccagttggtatgagtataatatattctgtatttccaagaaaaaagataggacttgcacttggggtttatggaatagcagctatggcagcaccggccataggaccaactcttggtggacttattatagaaaaaatggattggagactaatttttactgtaaatatcccaataggaataataggagtattgttggggatgattattttaaaagggcaaccgatgaaaccatttaaggcatttgatatagtaggatttttatcatctactgtaggtttagtaagtttgttatatgtacttggaaaaggatcctcaattgattggggtgatatgataaatccaatgttagtagtgttggggagtttaagtctcatattatttgtgattaatgagcttacacatccagacccactattagatttgagagttctcaaactatttgattttagtatgagcttagttataataactgtattaactataggattaatgggaggatcatatgtattgcctttatttcttcagaatgtaaggggatataccgctatgcaggcgggacttattatgtttccatcagcactagttatgggggcattaatgccgttaagcggaacgctttatgataaattcggagctaaacctgtagttatacctggtcttattatattagcattagctacatttaagctgtcaacagctataaatatgaattctagcaaagaatcaataatatttattaactgtataagatctattggattgggaatagccatgatgcctattagcactgccggtatgaatgtagtaaaaggcgaaatgattccgagagcatcagcattgaatagcactataagacaggtggcaagttctctcgctgtaactataatgacagtaataatacaatcgaaaacaagctataattattcaaaacttgcagagcaaataaatatttataataaaacagcagtaggaactataaattcactaacaaaatcatatatgtatgaaggttttcctcaagaaacttctaaagttatggcactatctcaattggcaaaaattattcaaggacaagcatctgtagatgctatggcatattctatttcggtaactggagctatagctgttgtcgctatatttttaacattatttatgagaactagaagatgatataaaaaattaaatcatgatagaggaatggagtatttaataataggtatatataaattaaaaagacattaatataaaaataatataaaattttactaatgaatttaatagataaataagaaaatacttataaattaaattgattaaaggggatagaataatgaaagtaaaggattttatgattactgatgtaatttctgcaagtaaagaaaatactattaaagatgtaatgaagatattagtcaccaataaaataggcggagtaccaatagtagataacaagggaatactttcggggattgtaagtgatggtgatataataagaagtataaatcctaaagaaggaaaaatgtatgattttatttcatatgtattttatcttaaaagggaagaattagaagaagaaattggactgataaaggatactaatatcatgactattgcaaaatgtaaagatatttgctgtgtttttccagaagatactatggaaaaagttttgtctattttctcaaaacataactttaaaaagatacctgttatagataaagatagaagagtagttggggttattagtagaggcgatgtaattagatatatacagaaaaagattatagataagttgtagataatagaaaaagaacttatctaatataattatatattaagataagtataaataaatataacaattgatctagaataataggatatagaaataaaaaggtgattgttcatttagaaaataatttctagatgaacagtcacctttttgttgtagaattaagccgctttttttatggattctacatattctttaccctttatagaattatactttccttcccattttgatacaacaacaactgctagagaattacctaatacattaacaacagttctagccatgtcaagtatacgatctattccagctataaaagctaggccttcggctggaattccaacagaaccaagagtagctagcaaaactacaaaagatactcctggcacgcctgctataccttttgaagtaagcatcaatacaagcattaaattaatttgagctggtattgataaattaataccatataattgtgcaataaatattgcggcaatagcttggtaaagggtagagccatctaaattaaatgaataacctgttggtactacaaaggttgcaatagatttaggacatccgaatttctccatcttctccataattttaggaagaactgtttcagagcttgcagtactataagcaaggataagttcgtcttttaaaattcttatgattgaaaaaatacttgtcccaacaaattttgcaattaatcctaatactattaatataaataaaatcattgaaccataagtagtaacaattaattttccaagtggaattaaagatgaaagtccaaacttagaaactgttacaccaattaaagcaaataccccaaaaggagctgttttcattatttgatttgttacccaaaacattgcatcagctgtgccttgagcaaactgtataacaggtttccctttttcaccaaccgcagcaactcctaaaccaaacataaccgaaaagaaaatgattgaaagcatatctccccttgtaagtgaatcgaaaatattagtaggcacaatatttataaatgtatctgcaaagctatgatgagccacattttccgcagtgcttacataagcatcgatgctagatgtagcaagctctttcatatttattcctgtacctggatgaaatacattagctattaaaagtcctaatacaatagcaatagttgttactacttcaaaataaagaagagtttttcctccaagtcttccaacctgcttaatatctcctgctccagcaataccaactataagagatgaaaagacgattggaactacaatcattttgattagacgaataaaaatatctccaataggctttaaatatgcctcaacagctggatttccataaaaaaatccacctactataattccaagtataagtcctgcaagaatctgtaatgctagaccaaatttaattttcttcatagtaaattctccttccttagtttaaaatttgaataaaaataatattaaatatgacactattatcatttcgagttgcaaattattatgataacttagcaacattttgaattataacataaaaaatgaattttgtctctagaaaaaattcatttttaaaaataaagaatatatctttttctcgttgttcaattaattgaaaatattactggttattaattatatttttaataaacttaatatggggcacttacgaaaaattagattttaataataacagaaaagcgcgaagataaatgggttaggatagaaacttgaacatattaattaatataataaatttatatttaaaaaattagatactgattttcaaaagagttagcaaatcaaaatatgaaaataaacataggtaataatgcaaaccagataatatgaaatgtgtttattagaccgtagaatatgataattccattaataaagtagttacagtactttagttgtttattcgttgcatctttcattctaaaatatatgaatgcaagaagaactgcgggagctaatatttttaataaaaaacttatagttggactttttactacttctaacatgaaaatatttgcttctacgtaaaaaccagtatttaagagtaaaatagtaaatattatgtctgttacattcagaatatatagagctaaaaactttatttttatatttttaagagaatagtttcttataaaagtaatcattaaaacacctccatttagtgattattaccacaatgaagatatagtataagttttattaattacaggtagatgtatattttttattagaacgtatattttaaactgcattattatagaaatgttcttattttctaattagattttatgttactatatttttatagctaggatttaaaatattaaaaaattaaaagagctgtggagaagatagaagtaagggttatactaagagaattttacggaaagagcaaggtataattacagaaaaagaaaaaataatataatataaagagaggagttcaagtaaatggacatatacacaataggacattctaactatcctgtagagaaattaatagacatgctaaagacttataatattgatactgttgtagatataagaggaactccgtattcgaaatataatgttcaatataataaggaaacaatagctgaaactttaaaaaaagaaggatttatatacatatatatggctaaagaacttgcggctcaaaggcaagataaaaagtcttataataaggaaggatattctgattttgaaaaggtaattatagaagaagattttttaataggaattgagagattaaaaacaggatgtcagaaaggttataatattgcacttcttggagctatgcaggatcctataaggtgtcataggagtatattagttggaagatcattaagggaaaacggatttaatgttaagcacattttggatgactatactttggcgtctcaagaaaaaatagaagagaaacttttaagtaaatacttcagcaatagaaatcagattactatagatagcttacttggtaatgaaattagcgaggatgaaatgattaaggaaggttatcgactagcaaataaagaaattggatatagagtggagcatttagaataatagaaatcaaaattaattcataatacatatattaatatgtattactaaattaggattttaattatgaaaaaaattttatctaaagtattaagaggcattaggattaaaaaaaatggtattagagcagatatgctgaatgaccgtattagctctgcagattatgtaaactctaagaattattctagtgaaaccaactacttgatttgggtggatactggaagctttaaagtgaatatttttaaaggaagtacaaataagtggaacttaattcatagttatttgtgcactttgggaaaagcctcaacacccacacctaaaggaacttataaagttggaataaagggactgtattttggcgtaaataagggatacaagtgttggtattatacacagtttaaaggaaattatttatttcattcgataatctataatttgaatggatcagttagggatggaaggttaggtatgaagctatcagatgggtgcataaggttagtcaaagaaaatgctaagtggatttatgacaatatacctaggggaactaaagtagttataaattaactttcatttatatatttggatagatgaatactttaaaagttaaaagaataattatataaaattacatttagtaattaaacataaaagaaaacatattgcattaaatctagtatatggattttattataaaaaatacaattattcagaaaattcaaaaaactattgcaattaataataaaatgagatataattaaatcaagataaaggtttaatttatcttagtgtactgacacttcaatccggcagaagagtatatctcaagagatatacagttggtgacgggcaacggaaaaatcccggaagcaatgtacgacagacggtcgtacccagttggcggacaacgttaaaatcagtaactaagaaagagcaagtgaagttagtaagattcacttgctctttgtcttttataaagataataattgattattataattaaaatgtttaatataagttgattcatatatccatctaaattttatattagatttaggtggaatttttattgtaaaataattttaagaaagtagtgattttcttgcaaaggtggggattaaaatatatactagtttgagaaataaaatatactttatttttatctaaatgtattgattggagtaataattaaatgaagaaatttaaaaagatttatatagagataacaaatgtgtgtaatttaagttgtaatttttgtcctaaaacaaatagggaacttaagtttatggataagaaaagttttcaacatatcgtaaatagtgtgaaatcacatactgattatgtatattttcatctaatgggagaaccatttttaaatgaaaatataaagagttttttggatataagtaatgaaaattcattaaaggttaatataactactaatggaactttaataagtgaagttaaggatgtattacttagttcaaatgctttaaggcaagttaatatttcccttcatagctttgaagcgaatgagggacaggttgactttagtaaatatatagataatataattgaatttgttaaagaagccagtgaaaaaactaatataattactgcgttaaggttatggaatttagatacaaagtatactgctagtaatagcatgaatattgatatttttgaatttcttgaaaaaagttttgatataaaatccagtttgagagaaagtttgaaggaaaaaaatagttttaaattaaaaaataatgtatatcttagtatgggagaaaaatttaagtggccatcattgcaagttgaagagttaggagaaagagtcttctgctatgggcttagagatcaagtgggaatattagtagatgggacagtagtgccttgttgtttagatagtaatggcagtatagcacttggtaatatctttgagaatacattagaagaaattctaagttcaaaaagagctatagacatatataatggtttttctggaagaaaggcagtagaagaattatgcaaaaaatgtggttttataaatagagtaagatagtgggggcgttgttaaaatggaaacagcaattaagtcggtaggtatttttctattgatatatttttcgtattactatgtattaagatttatacaatcggtttttcaaggagcactgagtagtataaatgcaggagtggctaaatttatatatgcgttaagtacaccagctcatgaacttgcacatttattggttgcaattttatgccttgctaaaatagaacaagtacaactttttccaaaaggaaacagaccaggatttataaggtcaagggttggaagcagtatgccatttttaattagcattaaggaatttcttatagctatagcacctgtcataataaatataccattattcatatttatagagagtaaattcgtattaaaagataaagttgctgatatatctagaatactagatccgagaataatagtgagtaaagaaggtataataactatatttttatttttagtgctaataagtggaatagcaccaagtcatgaagattttaagggaatgataaaaggacttataattcttagtgcagttatattcggattatcatttttaacttcaatgtttttagatatgaagtggatgaatgcaaagccaatattaacagtattattatattatattgaattaataatattcgtgttgataataaatgctattatacattataggaattgtttcaaaataacatggattatactaataagtgccataaaacatgcttttagaaaaagttgatagataatagctcctaaatagtaaatcctttataaagattcttaatttatacattggaagaatatttttgtataaatatagaaataatggctatactccttgataaggagtgattattatggtaaataaaaagaaattattcataggtatgacattagcattagcacttatattttctataacatattatttttcggaaaagtatataagtaacaaaaatgctaaaaataaccctgtatcatcaagtgaaataaataataaattaaatgataatataaaaatttatttatatgcaggtgaaaagaaagaaaaagaattaacattgtcagagttaaagaaagaattaaatatagataagaatttaacagaaacggaattatcaaaggcattaaaagataagggatatgttttagaagtagaatctaatggagaaatgacttataaaagagatgcttctaaagctgtaaaacctaataaatattatattggagaaaaagatggctttttagctatatataaaactgatgataatggtactttatcaattgaaaatagcgaagatgtgtatactaatagtaaaaaagtagataaattaagtgagatagataaagacaaaattaagaactttgagcttgaatataattcaaaagacgatgcagaagaaagcttgtcagaatttttatcataatggaaattctgataggtaaattttaattgataaaaggcatgttagtaatttaatacttacatgccttttattaattaaaaaatacattgttgaaagatttggctgaaaatgataaagtataagttaggttttaataatgtagaaattagttttttagctaaattttaaatatagttatagatatagaaaagttggtgtgaaatagatgtacgaatatataaaaggtaaatatattggaataaataaagattatgtaatagtagagaatagcggtataggctacaagatatttacatcaggtgctacaatgtcctctatgccaaagaatggagaggagattatgctttaccttgagcaaatagtaagggaagattttattggattatatggatttgattcaaaggaagagctagagatgtttaagcttcttttaacagtaagtggagttggaccaaaagcagcattatctttattatctataagcagagttaataatttaaaatatgcaataatgactggcgatgagaaacacatctgtagaggtgtgggaatagggaaaaaaacagcagctagaattattttagagattaaagataaattaaagccagatgaattattggatagcagtgtggaaattgatacaaatgacaatgagaatgttatggcattatcagaagctttgagtgcgttaattgcgctagggtatagcgagaaggaagcagaatcagtacttaaaaagatagataagaatgatagtgtagaaaatatcattaaaaatgcattaaaggcgttgatgggataaaacttctaagacataagtagcaaaaaattatacatatatgactcacaagaaaagggggaggttttttggaaagaatagttaatccatctgagatgcaagaagattttaattctgaacttagtttaagacctcaaaaaataaatgaatatataggacaagagaaagtaaaagagcgattagatatatttattaaagctgcaaaaaatagaaaagaagcattagatcatacacttttatatggaccacctggacttggaaaaactactttagctaatattatagcaaaagaaatgggtggggatttaaaaattacttctggaccagcaatagaaagagcaggagatttagcagcgatactaacaacattaaaagattacgatgttttatttatagatgaaatacataggctaaatagaaatgttgaggaaatattatatcctgctatggaggattatgctttagatatagttataggaaaaggtgctacagcgaaatctataagaattgatcttcccaaatttacactaattggagcaacaacaaggattggaatgcttacatctccacttagagatagatttggtgtgctttgtgccatggaatattatacagatgaagaacttaaagagatagtaagtagaagcgctttagtttttgggtgtacaattactgaagaaggtgctttggagattgctaagagatctagaggaacacctagaattgccaataggctattaaaaagagttagggattattcagaagtaaaatctaataagctagtatcattaaaagaggctagagaggctttagaattattggaagttgataatcagggatttgataaagttgataataaaatacttgaagctattattgataactttaacgggggacctgttggaattgaaacactttcctattttataggtgaggaattgggaactatagaagacgtatatgaaccatacttgcttcaaaaaggctttataataagaacaccaagaggaagaatagctagtgataaggcctatgaacatcttggaagagtaaatacttcaaaaaacaaaagtaataatgggaaagtacaaggtagcttttttgataaatagattaggtaggaatttattagtaagcaccttaaaattgagttttgaacaactgagatagttttcgaaagtttaacttcgttagaagtgtcaataataagaataagctgttagttaggagaagagatataaatgaacgtaaaagattttgatttttacttaccagaagagttgatagctcaacatccgttggaacaaagagattcatcaagacttatggttttagataagaaaactggtgaaattaagcataagaaatttcacgatattatagaatacttgaatgaaggagatactttagtattaaataatacgagagtaatgccagcaagattgattggagaaaaggaaggtactggcggaaaaattgagttccttctacttaaaagaattgaaaaggatagatgggagtgcctagcaaagcctggtaaatccgcaaaagttggtagaaaatttacatttggagaaggtaagttaaaagctgaagtagttgaagtggaagaaaatggaaatagaatagttgaatttttctatgatggaatattcgaggaagttttagattcacttggggagatgcctttgccaccatatattcatgagagattagaagatagggaaaggtatcaaacagtgtattctaaagaaaatggttctgctgcagcacctactgcgggattacattttacaaaagagttattgcaagaaataaagaataaaggaattaacatagtatatctaacattacatgttggacttggaacttttagacctgtaaaagttgaatctctagaggagcatgaaatgcattcagagttttatatgctttcaaaagaaagtgcagatataataaacgaaactaaaaaaagaggaaatgctgttatatctgttggaacaacttcaacaaggacattagaaactattggtgatgaaaatggatttgttaaggaacaaagtggatggactaatatatttatttatcctggatataaatttaaagtagtggataagttaattacaaacttccatttaccagaatctacgttgataatgcttgtttcaactttagcaggaagagaaaatgttatgaatgcatatgaagaagcagtaaatgaaaaatatagatttttctcctttggagatgctatgtttattaaataaaaggtttgattacattgatgaggtgacatagtcaagtgtttcaatataaaatgggatgaattagagaataaatattgattttataattcagctaacaactaaatggaagttagtttctttaaagaatctcagagttgctcagtaaacaaaagtaactgagtttcgtaaaaatataattaagaggtgaacgcttgtgagtaaaaggtatactttattaaaaaaggatggaaaagcaaggagagggcagtttgaaactcctcatggaactatacaaactccagtattcatgaatgttggaacattagcagctataaaaggtgcagtttctagcatggatttaaaggagataggatgccaggttgaactttctaatacatatcatcttcacttaagaccaagtgataaagtggttaaaaaacttggaggattacataaatttatgaattgggataggccaattctcacagattcaggtggatttcaagtattttcgttagctaagatgaggaaaataaaagaggaaggcgtatattttaattcacatatagatggaaagaaaatatttatgggaccagaagaatcaatgcaaattcaaagtaatttggcatctacaatagcaatggcttttgatgaatgtattgaaaatccagcacctagagaatacgtggaaagatcagtagaaagaactacaagatggcttgaaagatgtaaaatcgaaatggatagattaaattctatgccagatacaataaataaggaacaaatgttgttcggaataaatcagggtggagtttatgaagatataagaataaagcacgctgaagaaataactaagatggatctagatggatatgccataggtggtcttgctgttggagaaactcatgaagaaatgtatagagtgatagatgcagttgtgccacatttgccagaagataaacctatatatttaatgggagtaggtacacctagcaatatattggaagcagtcgacagaggtgtggatttctttgattgcgtacttccagccagaaatgggagacacggaaatgtattttgtggtgaaggaaagcttaatcttatgaatgcaaaatatgaacttgatgatacacctattgatgagggttgcgaatgtccaacatgcaagaattatacaagagcatatataagacatttatttaaagcaaaggaaatgcttgcgatgagattgtgtgttttacataatttatatttttataataagctaatgaaagatataagagacgcaattgaaggtggttatttcaagaaatttaaggaagaaaaattagcgcaatgggaaggtagataattgaaaatgattatttatgaatttgataggatgtagatctttacacaatttctaaatgaatatgagtaacaaatgtaggtttatattgacattaaagtaaataaaatgtaaactacatatcatgaatagaaaaaaatataataacacattggaggaaaagtatggataatatgtcagcgttacttacgagcgtagtgccttatttacttgtatttgtgatattttttttccttcttatattacctgagaagaagagaaaaaagaaatatcaaggtatgattgatgaattaaaagtaaatgatgaaattgtgacaaggggtggaatcttaggtaagattacacatatagatgaaaaaacagttacaattgaaagtggtcctgcaaaaactaggattaaattagagaagagtggaatatctcataaaataaagatggattaatcataatgccctttaatatttcataaaatgaagtgttggggggtgtttttgatggaaaatagtaaatattttagatcagtagtaaaaggtactattggaactttgattttaagcttcataggagttacaattctatccttattgatgactaaactagtatttagtaaaggtatttttaacatgatatatgtaataatatctttatgcagtttaagtttaggagcaatgataggagcaaagaaaaatgaatcaaagggatggcttgtaggctttggagtagcactatcatattatttagtattgtttatactatctagtagctttaatggagaattagcatttaagctttttgacttcattaaattgattatagcactagttgtaggtactcttgctgggatgctagggataaatttataagatacttcagctttttaatgactaacgttacaaagattaaaagaagttatacatatgtgaaatcatttttatttaaatgaaggttaaacagtattttattgttatatcatacattaataaaaaactttattaagaaattatagtgtgctataatgaacaatgtgcaacataagaatgtaataatatttaaaattaagaagtaataagttctttaaaattcagcttaaagactttaatttcttaattttaaatattaaagtattttacataataaaggaaactgttaatgaaattgtaatccaaaattttcagtaaggaatatatagtaaatactaacctaatgaaagacataatatgcagagggggattaagatgaaaagaaaaagcaaaagttcagcattgttgatattaattattgctgtaattggactgttagcttttgcaggatttaaaggatttgttctaggaggatgggaatttaaatcatttgataaagtaataactagaggactagatttacaaggtggagtttctgttcttatggaaattcaaaaagatgatgtaactgcagaagaattacaaagtgctaaggaacatttatctttaagagtaaataaacttggtgttgcagaaacaattgtagcaacagaaggttcaaagagaataagagtagatgtaccgggattaactaattctaaagaaatagtagatagtttggttaagtctggtaatttgagttttaaagggccagatggaacagaaattttaacaggttcagatgtaaaaaaagcaactgcacaaatgaatcaacaaaatggtggatatgaagttggtttagaattaaatgatgaaggtgcacaaaagtttgcagatgcaacaggaaaatatattgggcaaaatatttcaatctaccttgatgatgaagaaatatcaactgcgcgagtaaattcacaaatttcaggcggaaaagcaagtattgaaacacatgatacattagaaaagaataaagaattagctggaatgattaatgcaggtgcacttccacttccagttaaggaagtttcagttagcaatgttggagcggaactaggagctacagcatttccaaactctgttaaggcaggaattataggagttggattagtatttttattcatgttattccattatagaattcaaggattaatggctaatattgctttgactttgtatataacacttacactttttgcttttatagaagtaggtgttacattgactcttcctggtatagcagcattcttgcttactattggtgtggcggttgatgcgaatatattaacatttgaaagaactaaagaggagttaaagaaaggttatactgttaaggcggcagtgaaaaaaggatcagagcatgcattatcttcaatagtagattctaacatgacaactttacttgcatcactaattctatattttataggatctggagcggtaaaaggttttgcaattacacttatgataggtatagttataagtttatttacaggtctagtagtaaccaaagtacttgttaatttagctgttgaaagtggaattataaataagccatcacactttggtgttactttgaaaaagggggatgaaaaacatgcttagaataatggaaaagacaaaattatggttttcaatatccctaataattattataatcggaatgggattcttatgtgttagaggactaaactttggtatagattttaaaggtggttctgaaatagtacttcaactagatgaaagtataaataaagaagaggttgatacaatcattcgaagttatgcaccagatgcttcaacgaatacagttaataataatcaatatgaaataaaatcagcagatcttgatagtgataagttaggatcaattgtttcagatttagaatctaaatataaactggatgataaagtactagtttcacagaatgaaataggatcatcagtaggtagagagttaactcaaaactccatatatgcattacttgcggcttttgcagtaatgttagtatatatagctattagatttgaattcaaatttggagtagcggctatagcagctacaattcatgatatattagtaactatttctgtttattcaatattttatattccagtaaatacaccttttatagcagcgatattaactatagtaggatattctatgtgtgatacgatagttatttttgatagaattagagaaaatacaaagataatgagaagggctaaatcaattgaagtagcagatgtgagtttgactgaaactatagcaagatcattatatacttcttcggcaacagttgttactataatagctatgaactttttagtaccatctgttcaagcatttacgattcctttaattgtaggtatcataagtggagcatattcatcgatatgtatagcatcaccaatttgggtatacttaaaagatagagttagaagccaaaagaaaaaattacaaaaaacttaattactggaaatgaaaaaaacctccagcacaatgggggttttttcatttgttaacaaaataattgtaaaatttattataatcatttataataaaggtgttttctaattttatggaggaataaaccatgcgtaaattctgggaaagtatatattgtccaaattatattagcggatataacccatttatacttaagggtatgaacaaagcaatagagagattagctttggcggtaaataataggcaaaaaatagttgtttatggtacatataatgtcgatgggatttgtgcagtttcatcgttaattcttgttttaagatatttgaatgctgatgtagaatatttaatatacgataggcaagaaactgatgctagaataaattcggtagatataaaaaataacgtagattttttaggtgctgaactattaataactttaggtgttggattaaaatctaaagaagaagttgagctatgcaaaaaactaggtattgatttaattattcttgaaaatgaagaaagtgaccttgttaatgactatatttacataaatcctaaccaaaagggttgccaatacagatataagaacttatcgacaagtggacttacttttaagcttatgcaagctattgctatatattataatatgaaaagtataaataaatatttagatttaatacttataggtattcagtgggcaaaggtaccatcaaaaggagaaaatggagtactaattaaagaaggaaataagttcctgatgaatactaataataatggattaagatcaataatagaatttaacagtttggaagagtttaataatgatggtataaataatataatagaatttataattccacctataggcgcggtaggggttatggataatgctagaattgttttagagctcttaactacaaatgataaagatagagccgatcaaattgttaaatatttatatagactcaaaacaaataattccataaggtatatggaaagttaatcaaatagtaaagcaatatttattaattattagttgtttaatattaaatcataaatgatatgttaaattaaatgctatggaggagttaaaatggatttaaaagaaaaaataagggtaatcgaaaattttcctaaagaagggattagttttaaggacataacaacattaattgctgatggagaagctttaagggaaactatcaatagaatagttaaacatctagaggataaaaaaattgatttaattgttgggcctgaagcaagaggatttatttttggagttcctgtggcatatgctttaggagtaggatttattccagtaagaaagccaggaaaattacctggagaaactatatcagttaattatggattggaatatggagaagatcagcttcaacttcataaagatgcaatcaaaccaggtcaaagagttgctgttgtagatgacttattagcaacagggggtactgtggaaggtgttgctaaattaatagaacaagcaggtggaatagttgcttcacttgactttgtaatagaactaacagaattaaaaggaaaagataaattagaaggatatgatgtattatcattagttaaatacgacatctaagttgtggttttagatattttaagagttgtttctgggcattataattggtaaggattccatttcttttaaatgtattgttgaaaataattctaaaataatatataattattaaaaagttaggctggttattaaaccagcctttgaatttaggtatattcaaaaaagcggagcggaattcaggatactttattaatttgattgtattttattctgataaattgactaacactaagaatcagtatttattaaattatctgcctaaaaattatactgtaatttctgatctgttattttgttttagatacttacttcaaatgaattaatatagaaggagcgtaatccttatgattgataaattactggaaaagattgataagaattgtaataatgttgatgttgaaatggtaaagaaagcatatgattttgctgaaaaagctcataaggaccaaaaaagggaatcgggtgaaccgtatattattcatccgatagcagtagctgaaattctagctgagttaggtatggatactaatactattgtagctggattattgcatgatgtaattgaagatacggaattttcttatgatgaaacagtcagcctttttaatgcagaaatcgctaaccttgtagaaggtgttacgaagcttactaagcttggagaaatggaatataaaactaaagaagagcaacaagctgataatgtgagaaaaatgttgcttgctatggcgaaggatataagagtaataattattaaattggcagatagattacataatatgagaactctcaaatttatgccagcaaaaaagcaaaaaaataaagcaaaagagacattggatatttacgcgcctttagcgcataggctggggatgtctaaaatcaagtgggaattagaggatttatgttttagatatttacatgaaaaagaatattatgaattagtagatagtattgccgaaaagagagtagaaagagaaacttacataaacgacatagtaaatgatttaaaacaaaaacttggaaattctggaattgaatcggatattgatggaagaccaaagcatttttatagtatctacaaaaagatggttagtaagaataaaagcatagagcaaatttttgatttaacggctattagagttttggtgcattctgttaaggattgttatggtgtccttggaatagtgcacactatctacaggccaattccaggaaggtttaaagattatatagcaatgcctaaaccaaacatgtatcaatcattgcatactactgtaattggaccacaaggcaaaacttttgaaattcaaattagaacttttgaaatgcataaaacagcagaatatggaattgcagctcactggaaatacaaagagggagataacgccaaaggagagcaagataagcaaaaagattttgaaaagaagctagtatggcttagagatatgttggaatggcagaaagaaacatcagatgctgaggagtttattgaaggctttaagatagatctgttttcagatgaagtatttgtatttactccaaaaggtgttgtaataaatttatgcagcaatgctacgcctatagattttgcatatagaatacatactgatgtaggaaataagtgcgtaggtgctaaggttaatggtaaaatagttcctttagattatactctcaagacaggagaaattgtagagattttaacttcgcctaatgctaagggacctaatatggattggttaaacattgcaaaaagtaatcaatctaagagcaaaataaagctttggtttaaaaaggctaaaagagaagaaaatatgctaaagggcaaggaacttcttgaaaaggaattaaagaaacagtgtgttaactatgctgacgttgctaaaggggatttttatgaaaaattagttaagcgatataatattcattctatggatgatttatatgctttaattggtataggaggattctctgtatctactcttattgcaagattgaaggaagacaatgggataggtgtagataaggtaaacaaggaaaaagaaaataaggaaattttaaataagaatatcgaggaacaaattgcaaaaacagcaagaaaaccagaacctaatggatatggaataacagtaaaaggtgaaagtaatcttatggtcaggtttgctaagtgttgtagtccagttcctggagatgaaattttaggatatataactaaaggtagaggagtatcagtccataggagtgattgcagtaatttgcaaaaccttatagatacagacaaagatagagtagtagaagttaattgggggtcagcacaaggtacatcttattttgcggaaattcaggtcgtagcggatgatagagatggattgttagcagatataatgagtgttataacagagcttaaactacagttaagtgctgtaaatgcgaatttagcaaagcaaggatcggcgctaattaacgtaaaaataaaaattacatctgtcgatagtctaaaggatttaatgaagagacttaagagattaaaaggtgtaacagatgtatatagagtaaatagttagaatcttatatatcagaaaggtgagataacatgagagcagttgtacaaagagtgagctcatctagcgtttgtgttgatggagatataattggtgaaataggtgtaggctttaatgtattaataggaatatctaaggatgatacttttgaagacctaaaatatataaaagataagattatcaatttgagagtgtttcatgatgaaaatgataaaatgaatttgtcactattggatattaaaggtgagatacttgtgatatctcagtttacattgtatggtgattgtagaaaaggaagaaggcccaattttatggacgcacaaggtggagaagaggctaaaaagctatatgaagaattcttagatcttcttaagacatcaaacttaaaagttgaatgtggagaatttggagcagacatgaaggttaaaattaataatgatgggcctgttaccatattattagatagtaagagaaatttttaggaggaattcaggttgattataaaaacattaatagcgggaatgtatgaagaaaattgttatttgataatggatgaaggcaccaaggaacttgcaattatagatccaggcgggcagccgaatttgatagaaaaagagattagtaaattggatggaaagcctaaatttattcttttgacacatggacatatggatcatgtgggaggagttattgaattaatgaataaactcaatattcctttttatataaatgaaaatgaagaacaatatatgaaaaatgacgagtttgtatttggatcactgccaaaagcttcaaaatatttaaaagaaggagatacagtatctttaggtaataatataataaaagttatagagacagctgggcatacagcaggtggtatatgcttcctagtaaatgatgaactgtttacaggagatactcttttccaaggatctattggaagaagtgattttccaggagggaatggagcacagcttataaaaaatataaaggaaaagttattgcctttgggagatagtgttaaagtttatcctggacacggtccagcatctacaatagggtatgaaaaaaggaataatccattcttataaaaataaaaatgtgcattaatttgcacatttttaaggggagaaacgatggaagttaaagttagtttaaatgattttaaatttagatacgaagtataccaattatttaatgtatattactcaatgagagaaattaaatttgtgagtgcagaagatgcagattatatggtttatattgatgagaaaaccttaaggtttgaatataataattattatgtagaagaatctttaggagaagatattaaaaattctcttagaagatttctttttctgtgccttagaaatgtaactcatgacatttatccttggggaatattaattggaatcagaccatctaaaatagcattaaaattgcttgaagaaggcaatactgaagatgaagtgatagaaatatttaaagaaaaatacttggctcatgaggataaagctagactttgtatagatgtggcaaaagctgagaagaaaatagttaataaggataaaaatactatagctatatatataggcatggcattttgtccaacaaaatgtttatattgctcattcacttcgaatcctataggtgtttataaaaagatggtaacgccatatatagaggcacttattaaagagataaaaggtatgagttcatatgtgaaggaaagaaaacttaatatcgaatcagtatattttggtggcggtactccaacatcagtaagtgatgaagagttcaatataattatgaaagaaatttataattgttttattaaggatgataatataaaagagtttacagttgaatgcggaagaccagatacgctgactagaaataaacttcagacaatgaaagagtatggagtagacagaataagtattaatccccaaacaatgaatgataaaactttaaatttaattgggagaactcattcttcagcagatataaaagaaaaatttaaaatggcaagagaacttggatttgatgatattaatatggatataataataggacttccaggtgagactcatgaggatgttattcatactaagaatgagttaataaaactaaaacctgatagcattacagttcatggcctagcgcttaaaagagggtctagaatgtatgaagaatttatcttaaaaaaaggaatacaaattacgtctcaagatgaaattataaaaatgtatgaagaaagtaggaatctggcagaaaatttaggtatttcaccatattatatgtataggcaaaaaaatatggttggaaatatggagaatttaggttatgctaaagaaggcaaagaatgtatatacaatattcaaatgattgaggaaaaacaaacagtaattgcactgggagcagcagctgtaagtaaagtgatatttttagaggaagatagacttgagagatttccaaatttaaaagatcttcatgaatatgtatctagaattgatgaaatgatcgagaaaaagaaagcgttgcttgatacattgtatacataattaaatgtaataaattagaatattgtaaatttgtttagtcaaataggaggaaaagatcaatggcgattgaaatgcaagcaccaaaaggtaccaaggatatgttgcctgaagatgcctataagtggcattatatagaaagtgcctttagaaaggttgctaaaacatatggaattagagaaattagaactccaatgttcgaacacacagagttatttttaagaagtgttggagatacaacagatatagttcagaaagaaatgtatactttcaatgacaagggaaatagaagtataacattgaaaccagaaggaactgcatcagcagtaagggcgtttgtggaaaacaggttatttaacgaagctcagccaacaaaattatactatattacaccagcgtttagatatgaaaatgtccaaaaaggaaggcttagacaatttcatcaatgcggattagaagtgtttggttcaaatgcagcttcgatggatgcggaagttatagcagttgctatggatacattaaaagaattaggcttaaaaagtttaagtttaaatataaataatttaggctgcccaagttgtagacctaaatataatgaagcgcttaagaaatttttagctgataattatgatggcctttgcgatacttgtaaagatagatttgaaaaaaatcctatgagaatattggattgcaaagagaagaaatgtcatgaaattactaaaaatgcgccgataatattggattatgtttgtgaagagtgtagtacacattttaataaagttaaagaatatttagatatcttaggacttccatatacaatagatccaggcatcgtaaggggattagactattacacaaaaactatatttgaaattttaacttctgattttactgtatgtggaggaggaaggtatgataagcttatagaagaacttggtggaccagatatgccagcagttggatttggtatgggtgttgaaagattaattatgactttagaaaaagaaaatatagaaatacctaaagaaaatttatttgatttatatattggtgctagaggagaagcagaaagtaagtatgcttttaagctggctagtgatttaagggttttaggtgtgaagtgtgagataaatcacatgggtagaagcgtgaaagctgaaatgaagtatgcaaacaaattaggagcagcatttactactattttaggtgaagatgaattaacaaataaaaaagttaatttgaaaagaatgagtgatggtgaaatttttgaagtttcattagaagacttgatggaaatagctaaaatagttaaataagaataagttaaactaagggaggattttagtaatgggtgaatctttaaatggattaaaacgtacaatgatgtgcggtgaacctagagaagaacatgtaggcaaaaaaataacattaatgggatgggttcaaagaaacagaaagcttggagcacttgaatttattgatttaagagataaaacaggtataatgcaagttgtatttggtgaggaaattaatgcagaagcttttgaaaaggcaaaaggagtaagatctgaatattgcgtagcagtaacaggggaagttgttaaaagagaaagcattaatgaaaatatgccaactggttttgttgaattaaaatgtgaaaatataaagatactttcagaatcagaaactccaccaatatatataaaagaggatttagatgcagctgaaaatattaggttaaaatatagatatttggatttaagaagacctgatatgcacaaaatatttgaaattagaagtaaaactacaaaagcaatacgtgattatttagaagaaaataactttttagatgtagaaactcctattttatcaaagagttctccagaaggagctagagattacttagtaccttcaagaaattatcctggaatgttttatgcactcccacaatcaccacaaatatttaagcaattattgatggtatctggatttgacagatattatcaaatagctaaatgttttagagatgaagatttaagagcaaacagacaaccagaatttactcaagtagatatggaattaagctttgttgaacaagaagatataatggcagtaaatgaaggtttaattgctcacgtatttaaaaaagtagcaggcgtagatgttcagcttccaattaagagaatgacttttaaagatgctatggaaaaatacggttcagataaaccagatttaagatttggaatggaaataactaatataacagaagatgttaaggatttagattttgttgtatttaaatcagcaatagaagctggcggatctgttagagctttatgcttaaagggcggagctgaccttggaagaaagcctttagataaattaggtgaatttgttaagacttataaagctaaaggtcttgcttggattcaacttaaagaagatggagttaaatcatcaatagctaagttcttaactgatgatgtaacaaattctatagtaaaaactatgaatgctgaaactggagatgctatacttatagtagcagataaaaattcagtggtattccaaagtttaggtgcgttaagattagaacttgctaagcaatttgatttgattaaggataagaatgaatttaatttcacatggattactgaattcccactatttgaatatagtgaagaagaagaaagatacaaagcttgccaccatccatttactgcaccaatggatgaggatttagattttatcgaatcagatccaggaaatgtacgttctaaggcttatgacttagtattaaatggtgaagaactaggtggaggttctataagaattcatgatacagctcttcaagaaagaatgtttagagcacttggtctaacagatgaagtagtgaatgaaagatttggatacttattacaagcatttaaatttggaccaccaccacatggcggtttagcatttggtcttgatagaatgattatgttcttagcaggaacagaaaatatcaaagatgttattgcattccctaagaaccaaaatgcatactgctacctaagtgaagcaccaaatatagttgatgaaaagcaattaactgaacttggcataggaatattaccaaaagaagaaaaaaatgataaagaatagaattaattaactaattaattataaaagactcttatacgaatgaaagtataagagtctttatttaagtttatattattatatagggttaatttatatagataagacttttaattgtcttgtttcaatttacaattggttattattagaagagtattggcgcattggtatttaggatatcaataagcctcctgcttaatagtggttcttcaactgcattatcgcaggcgaatttaagagcctctaagctcatagaaatatcttcttctatgaattcttttgattcccatgatacagattcctttacaaaattaaatatgtcacatgggttatcaaaaatttctataaatagtctttgattaggatcgttattccaagttgcattaaacttttgagaaaaagatttcaattcttggcttaatgactcagaatcatattcccaaagattatttaagaaattatataaatttttcatcgaattcacagaaattaaatccacatttgaatcattgtatttcaaagtctcattaataacagtatcaaaatctgatactggaataaagaaaccatcagatttacggtcaaaacaagtaaaaaaagatgttggcaagaatacatgttgtaaaaatcctaataggctatagccgcaaggataagcagcccaaccacattggagaatatttttttcaagatcaaagattccagtataaattacttttgaggtgttagttatctctttattatcaaaatagccctcccataaattttcttcatttaggattttttcttcccaaaaagaaaagtttctataaggtttattttgaagaatattttgttttatgttaaattccaatgataaattcctcctctcgatgttatcataatattttaaaaaatacattttaaatttatgattaattatgttagagtttagaatagaattctacaattaacgaatcattgatttcaataggaacttcttctcttaaagggtatcttataagagttcctgaaaaattatcttgatctttggttagatacggggaggtattaagagtattagataaaaaagtatccctaaacaagtcgttgcttctggacttttcttttaaagaaattatatcacctatatttacttcaaaagaaggaatatctacctttttatcattaactaaaatatgcccgtgaactaccatttggcgagcttgtgcaatagaagacgaaaagcctagtctgtaaactaaattatctaatctacattctaacctttttattagagcataaccagtaggttctttatcttttaacgcttttcgtacataggaggcaaattgcttttccattacaccgtagtatgctctgagtctttgcttttcaagtaattgaaggccataagccgaaagcttttttgcgtttctagcactgccattgttggcccttttcatagctttgggatgtccactaacgtttaatcctaagcgtctacacaacttgaatctaggttctctcattcttgccataattatcatctcctataaggtcttgttttgataaaagtcaacctaaaataatacaacaaatataatacacgaataaaaatcatcttaatgtttttaaattctagcggaataatattatttagaaatatatattgatgatttcataaattagtttgtacaagataatttatttgacacgttgtattttttggtaattgagtttaattagctaaaattatgaaattaaatttattatttgtaaatcgcaaagtagggataatgagtcatatatgttataattaagcggaaaataaaatgataaaaaagttgggggaagaaaaatgttaggaacaatagttaattcgttagcaataataggtgggtgcttaatagggttaatagtaaaagggagattaaccgagaagattagtaatacaataatgaatggtttagctttatgcgtattatacataggtatatctggaacgctcaagggaaaagatacattgcaaataataatttgtattgcactaggtgctcttataggagaaattatagatattgatagaagattaaatgatttaggaaatatgattgagagaaaaataaatggaaaaaggaaaaataattctaatgataaaatatccatatcagaaggatttgttacatctagcttattattttgtgttggagcaatggcggtggttggctctcttgaaagtgggttacaaggaaataactcaaccctttttgctaaatcaatactagatggagtgtcatcaataatatttgcatcatcacttggggtaggtgtaatgttatcatcaatcgcaatttttatatatcaaggaagtatcactttgcttgcaggaggactttcgacaatactcactgataatgtaatttctaatatgtcagcagtagggagtctattaattgtaggacttggttttaatatgcttgggataagtaaaattaaagttgcaaatttgttgccaggaatatttttaccaattatatttggatattttttaaaataagctggctgaattgtagtagaatataatattattacaattgctaattggaggatttagaatgaagatatcggaactaaagaggaagtcgaaaaaacaattgaaaggaaaatggggaatagcaataacaactttatttgtaagtttaataataataagtggattttacgttacgatgaagctgcttcaaccagatggaggtattcttcctagtattggcgaatgcgttagtgtttttttaggtggaatggctacattagggacatgcaaatttgtattaaatttggcatttggtaataatgaggaaaagtttaatgatttatttgtaggagttaatatttactttaaaaccttaggattatggatattgatcaatttaagtgtatctattgcaacattgtttttgataatccctggtattatagtctcgctcatgttttcacaagcgttcttcatattatgtgaagataataataagtctataatagaatgtttaaagcaaagtgtatcaattatgaagggacataatattcgtttattgcttcttgaattaagttttgttgggtggtggattatttcaattttgactttaggaataggattcttatggatatatccatatcaacaagtaactcgtgccaacttttatttagagataaagaagtaatttgttatttaaatcacagttgaataacataataaaatggttttttgattgagaaaacattgttgaataataaacttataagtggtgattttttatttgatgtataaaatattagataaaaaaatatagccaaaaattaatataagaattataataaatacgtatactattatttataatagttgtaacttaaggggggcgcaagatgaaaaaagtaaaaatagcactactaggattggggaatgttggtcgtggtgtttggatgattttaaactctaacaaagaagaaattatgaaaagatgtggatatgaagtagaagttgcaaaagttcttgttagagataaaaataaaccaagaggcattgaaatatcggatgaacttgtaacaactgattttaatgaaatattggaagatagtagcattaaaattgttgttgaagtcatgggaggaatggagccggccagagagtatatgctaagatgcatggaaaacaaaaagcatatagtaactgcaaataaaatgttactagcaaccggtggagatgaactttttgaaaaagcagatgaaaacggaattatgtttagttatgaagctagtgtagctggaggaattccaattataaagggaatagatgaaagcttaactgcaaataaaatagaaactctttatggaatagtaaatggaacaactaattacatcttaagcaagatggaacttgaaggtgctgatttcgatgatgtattaaaggaagcacaagaaaaaggatatgctgaagctgatcctacatcagatattgaaggatatgatgcacaatataaattagcaatacttgcttcattagcttttggatctaagatagatgtaaaaaatgtatatagagaaggaattaccaaaattggagctgttgatatgaaatatgctaaggaatttaaaatgggaattaaattacttgctatagcaaaagaaactaatggcaaagttgaacttagagttcaccctacaatgattccgaagaaacacccgctttcgaatgtttatgattcatacaatgctgtatttataagaggaaatgcagtaggagatttaatgttttacggaagaggtgcaggagatcttccaacgggcagtgcggtagtgagtgatattgtttcgattgtaagaaataatgttgaaacagaaaatccgaatccagtagtaaagaataacctatgggaaagagaaattttagacatgggttcagttgaaagtaaattttatataagagcaactgttttggatgaatcaggggttcttggagaaattactgcaatacttggaaaacataatgtaagtataaggtctgtgatacaaaaaggtgacgaagaagatggtcaggtaactattgtgttagtcactcacagaactagcgagtctcaaattgatggtgcggttgaagaaattactagcctaaaatctgtttacaaaatagataacataataaggatagaagattttaaataaattatagcctgaacatacagcttcatttgttgaaaaatagataatattctagtaaagattaatgttaatgccacttattatatgtaataagtggcattttcttttaattaaaagtttttgaaaaatcttaaaaatatgatacgaaaattaagtaaaatatagaaaaaatatgttataattactttatatttgaaaaattggacaatatatgagtcggtttgaataatatattatttatttagtggaaagaaaggggtggtcatttttgcccggaaaaataaaaaagatgattgacgaaatcattcaacaaagatcaaaagggaatcctgctattacggaaatgactatagctaaattaattctaaaaggaattaatcccaataagtttgatataaattctccggatgacatgacagtaattaataaactttttgatattgctaagcaattaaatgtaaaaaatttagagaatgttgggaaaagtataaaatcttcatcctcaagtaaaatagcagaagaggatgcagtaaaggatataaaaaatcaattaaatattaacgacataaaactaataatattttttgcatcttctaattataatcaacaaaagataagtttacttatgcaagaagaatttaaaggatgcattgttgtaggttgctctacagcaggagaacttgtaagtggagaaatattagataactccattgttgcaatggctattaattctaatattatttccgatgtgaaagttgaattggttgaaaatataaagaaaaatttagatttagaacctgcttttacttcttttgaagaatattacaaagaaagtttatacaatatgagctcagaaaaatttgttggtataacattaatagatggattaagtatgaaagaggaaaaaataatggatctgataggtaataggactaatgtgttctttgttggtggttcagctggggataacaacaagtttgtagagacttatgtttctgtaaatggatatacttctacagattcagtagctttaattttaataaagataagcgatgatgctgagtttagtgttataaaaacgcaaagttttgaatctttgggttatagcttcgttgcaaataaagtggatgaagaaaaaaggcaagtaatcgaatttaataataggcccgctgcgttggagtatgcacacgctgtgaaagttgatgatattaaagaaatttcaaaatattttatgagtaacccactaggattgatgattgaagataataatttttttataagatcacctcaaagagttatagggacaagcatgatgttttattgtaatatacttgaaggaatggaggttaaacttttaaaagctacaaatattattgatgatacgagaagggcaattgaaaatgaagctagcgaattaggaaaaattgatggaattataaattttcaatgtatacatagaactttggaattaaaaaagaaaaatttgtcagatgagtatgctaaaatatttaaagatattcctactataggattttcagcttatggagaacagtatataggtcatataaatgacacgtccacaatgcttatttttaatttaaagacaggaaaataaacaaagaacaaaagaataagaaatttaaatatatactttttatcgaatattacaatgttttgaagcgaggctataagtaatgaagaatttagaaaactttttttataaagctaatattcttattgtccatgagtactttgaagattcacgtgtgctaataaaatttcttaattatagaggatatataaatataaaaagtgtcaaaaaaagtgaatcaatcataaaatcaataaaagaaaatataccagatataattctaataaatgtaaatttggaatccatcaatggatatcaattgtgtgaagttataagaaaagatgaggatttgatagatgttccaattatttttataaacacaggtggagaagctattgataggaataaaatatatattgttggaggaaatgattatttaagtaccccccttgaatacgaggaagtcataaatagaattgaaatgcatttaagaattaagtttatggagcaaaagataaaatttcataaaggtgattatgataaaacatataatgaattaaagagttggaatagggttttattaaaaagaaatagtgatttagttaatgaagttattgaaaaagataatcaattagatgatataacatttgagttaaaagaattcaacattatattggaagaagaaatgaatgaaagaactagaacagaagaagcgttaaaggaaagtgagagacagttacggcattccatagaagaggcaccagtcccaataatgttatatacagaagatggatttgtaaagaagatcaatagatcatggagtgacattactgggtataaacttgaagatattccaacgatttcagaatgggcaaatatttcagaggcttttaaagaggaattgagcagtacaaatataaaaaaattatttaattcagagaaaaggcaaaacaatggggagttttctataagtgcacatgatggaagtataagaatttgcaatttttattcagcatatattggtgatttagaggatgggcataaattatttatgaaagtagccatagatttgacagagaaaaagcatatggaagaattgcaaaaaagtgttgaagaagagagaaaaaaattatatgaaattaaggaatacgatagaataaggacagaatttttttctaatatatctcatgagttaagaacacccattagtgttattttctcggcactgcaaatgcatgaacttaggttaaaagattgtatatttgaaaataaaagtattgataaatataaatatactaaaataatgaaacagaattgttatcgtattttaagacttattaataatattatagatataacaaaaattgattctgggtattttaatattaatgaacataatattgatattatcgctcttatagagaatataactttatcagtagctgactatattgagaataaaggactatctctcatatttgatacgaatgtggaagaaaaaattatgtcatgtgatccggaaaaaatcgaaagaattattttgaatatactatcaaatgcagtaaaatttacgtcaagtggtggaaaaataactgttagtattgaagattgctatgatagaatttgtataaaaattaaagatacaggaagaggtattccacaagataaattgaattctatatttgaaagatttatacaggtagataaatctctagctagagatcatgaaggaagtgggatagggctctctcttgtaaaatccttagttgagctgcacggggggataatatctgtaaaaagtaaaataaattgtggtactgaatttgttatatatattccatacaaactagtaaaaaatgaagaagaggaatattcgctttgtagctctataggtggagattgtattgaaaaaattaatatagaattttcggatatatataattaaaaatatagattttagtatattggataaataatcatcaatcataattctaaaaatattacaagaattttaacagtaattatgaattatacattgtgcattgtgaattgtgaattgcaacatgtacatgcttgtaaaatatttcttttataatgtaagtatatgtgaaaaaaagttaagataatatagtagaaagatatttttacttactttttttaagagttttaaacaaatgttgaatataaatttgatatttgttactatattaatgtatttaatagttggagataatggagtttcaaacaattaatgggactttatttatctctttttgattgttataggcagtaagaaataagaatttaaactatttgcccccaaaaggaatgtttctagagtgcgaggaataacttgctattgcatatctaagtattcaagtaatatagtttccagactttatatgctatgttattagaaatattaccttttaataatatatgaacctctgtatttatatagcttcataaatacagaggctttttaattccattctttatgttataatttaagcaaaagaaataaaatacagtgtggaggaaaaggatgggtaataatagagatttaattagatattcaaagatattattaagcgcatacttaattataggactaattttaatttttagtagttctatggttttagatttaagtcttaatgttttaacaatgatagggatatttgtggcgtgtacactggtatatggagtattaattagaaataaaaaatatatatctacggcaattattgttgccttgttatatgttgctgcaattatcgtatatagtccgttaattagctataatgctcatagaaatttaataggaaatatagaagaaatggatttttctagccaaatagaatatattgatataaatcagttgcctattattgataaagaacttgcatataagttagctgataagaaattaggtgaaattactagtcttgggagtcaagtgagtgttggtcaattgacattacaaagtgtaaatggtcaactgtgttatgttggaccacttgagcattcttcttttcttaaatggattagtaatagagagggaacaatagggtatattaaggtaagtgctacaaatcaaaatgatgtagagttggttacgcagcttgatggaaaagatattaggcttaaatatttaaattctgcatattttcttagtgatttaaatagagcggcttactttagagatatgaaagcagggcacacagattatacttttgaattagatgatagcggcagaccatattgggtcattacaagatatgatactggcgtgggcattacagaagagaaggccataggtgcattagtaatggatgctcagacaggtgaatcaactatttataatactgataatctaccagaatgggtagatagaatacagccaatgaaatatattaataggtatattaacaaatggggagaattagttcatggtgttttgaattttacggataaagataaacttaagacaacaacagatagtatgaatattatatataataagggtgtctgttattattatacaggtataacttcagtaggaagtgatgaatcacttgtaggatttatgcttacaaatacaagaaccggagaaactaaaatgtataaaactgctggtgccacagaagaagcgggcatgagatcagcagaaggaaaagtacaacagtatgggtacaaagctacttttccatatctgatcaacatacaaaatgagccgacatattttatgacgctgaaagattccaatggattagttaagcaatatgctatggtgaatgtaaaaaattataacactgtaggagttggggatactcttcaagctactctaaataaatatttagagggattaaccaatactaacatttctctcgaaagtggaaaccaggaagaagttataagaggagaagtagagaggataggtctagttattaaagaaggtacgagtatttatgacattaagttaaaaaataatgagaatattttctcggtttcaacggagacatctagagaggtcgcattaactcaggttaacgactcagtggaaatgaagtttattaaagttggagataataggtatattataactaattcatttagtaatctttcttttggtaacagtgagaaacagaaaaaggaataggaagaaaataattaaaattaagtattgcaattaaaagggagctatgatatactaaaatagttcctaaagggaataaaaaatatatcaaagatttaattatattaaaatttctccttatgagaaagtattatttaactaagtctttaaatttggaggaattgaaaatggaagataaaacattagtatgtaaagattgtggaaaagaatttatattcacagttggagaacaagaattctacaaagaaaaaggattcgaaaatgatcctgtaagatgtgcagattgtagaagagctagaaagcaacaaaacaacagaagatagtttctgtttgcaaagttaagctataagatattattcttatagcttttttattatatattagtataattaatatttttgtggtatatataggatattattaattgacaaaccatacactaatttatatggtcattttgaaccccttctcttttaactgaatgtctttttctgtttggattgtggttcatattttcttgagttataggagtttgatgattgcatttttccattctagcatgtttgttatcaggttgactatcttttggcataataaaaacctcccttaaacaataaatttacatattaattttttgctaagtggtacaatattattcgtaagctgtagaaaaaataataacaatattagttatattattaattaaatagaaaataaataaacctgctaaataatatattaattatacctatattatttagcaggtttattcaaatctattttcggtatataaattattttgtaatagttaatgtaaacaaaaacttagttaagattcaaatttaaaaaatttgtagcttcaacttcgctaatattttttataactgaaacttcttcaactaaaaatttgtaagcagtattaaataattgtttttcacttgaactaagtgattttttcttattcataagaatcagatcgtaaactacttctgcactatctttaagtaatccagatcttattttttttgcattagcctgatatctttccttggatgatgcaagttcaaattcactgcttttattttcaagagtgagtaatatatgatctaaggtagagttatcacaaacttttcgtaaatttgagttagatgccttatcacttggaatcataatttctaaattatttgacatgatctttacgattatgtattccttggtatttcctgaaaaaatcttattttctattctttcaacagtgcctatgccttgcattggataaacaactttatctcctatcaaaaacaaaaaacacacctccttaaatggttgttctattattataacacattattaaaaaaaataaaacttaaatatatcatatctattatttcatgtcaataatatttgtgtttttttagaatgtaatactaattccttgataactatgttgtgtaaaaatttatgtgacaattaaatgtaaataataaattaaaaaatacatatttaaagaaattatgataagtaataataatacaaaaaataaaataaatgtaaaaaatgtaaaaaaatatagaagcatgagagaaacaacaacttgataataaataatatgtgatgtaaaattaaggaaatgattacagaaaagagggggttgctggcgtggggattcataataaaaaagttataaaaagtgaaagaaaaataaaacggaaaaataagaatttgcttgctgataagattttggcttataatcccgagttgttggagggaattggagtatataaagatgcaagcagaaactttatatttttaatatttcttggagctttgttaatcgattttccgataatatcagtgccttgttgtatattatctatgttttttatcattagaatgttgcagtttataaagtataaaagcataaataatatagtaaatgaaattgcgaaggatttatcttttaaagggatatataataaaggtaaagtggatgatatgttaaatgattttaaagttaaatatggagaagatattgttgagtatgaacaattggtaagcatgttggataaatacgaagctttagtaacaaatattgaatttgctttaaaaagtataactgtcaaggataaaacaaatacagataacaaagaagaacttataatagataataatgaaattactttctttgaaaatgataataatataaattgtgaaatatataatagagatgaatataaaaataagaaagtaaataattattatagaagttttaatgaaaaattttctgtgctttataaaaatggtgatggagagattaagagagttaataaagcaattgagttctttgacgatggagataatgaaaacattaacgaaaatgccgttgtcctaaaaaatgttaataaagaaaataaaaatcttacagtatatttatataaaaagtcatcgccactacaaaaaaatgtattgtaatgagctatcatttataataaatttagtaaaaagtaaacttctattgactgtattatatgatttgaaatcgcagttataggagttgtctttttttttattttgtaataaaatctaatgagtgtagtaatatgtatttattaaaattaattataagtataattatattagattacttatggaggaaaaaatgcaagatataatgataataggtatagctggaggaagcggatcaggtaaaactacgttggctcaaaatataagagaagcttttagtgatgatatagtaattctttgtcatgattactattataaatctaatgagggaatttctttggaagaaagaaaaaaacttaactatgatcatcctaattcttttgatacagatctactaatagaacagcttagacaattaaaagcgggaaataccatatatcatccggtatattcttttgttgaacatacaagattaaacgaaactgtagaagtaaaaccagctaaagttgtaatagttgaaggtatattaatatttgaaaatgaagaactttgcgatttgatggatattaaagtttttgtagatacagccggtgatgttagaataataagaagattgctaagagatgtaaaagaaagaggaagagatttagactctgtgatcaatcaatatttaggtacagtaaaacctatgcatgaggaattcgttgatccgagtaagagaagggcagacataataattccagagggtggttgtaatgcagttgctttaagcatgctactggaaagagtaagaaattttatatataaagaatagcagtacataatttttaagtagtattaaataaagtgtgtctttttaagttttagtaaatttaaaaaggcatttattaattattatagacaagtgtgagtagtaatttataaaaaggagaagatacgtatgaaaaaggtggatgcagtaatatttgatatggatggcgtattaatagattcagaaagaatatcgctcaagtgttatcaagaagttttgaaggattatgagtatgaaatggatgaagaaatttacgtaaaattcataggaagaaatgttgaggggataaaagaggcgttgcaagaggagtttggaaaagactttcctttcgatgagatatataagaaaaaatctaaattagcattggaatttactgataaaaatggtgttaaaattaagcctggagtacatgaattattagattatctaaatagtgaaaattataaaatagcagtggctacttcaacaagaagacaaagggcgcttgaattattggaaagagcaaaaataaaggaaaaagttaattatatagtttgtggagaccaagttgaaaattctaaacctgatccggaaatatttttaagagcagcggaagggttaaatgttaaaccacataactgcttagttgttgaagattcggatgctggaataacagccgcccatgcagctagtatgacaggggttcatgttccagatatgaagatattagatgataagacaaagaagctagcgtttaaaatatgtaaggaattggttgatgttaagagtgttttagaagaaatcaaggaaaattgaatttaattaagattgagaaaggaacactaaaattatgagtgaaggattaataggttcttattggggagttaatttagaaagtaaagtaataagccaatctagtacgacactagctgttttgatgccaggaattggctatactttagataggcctcttttagattattcgaagaaattagctttagagttaggttatgatgttctttctttagaatatggttttcaaattgcaagaaaaaacttgcttgtagaaaaggagcttaagcacttaataaacgaatctatatgtatctttaaatcagcattaaaaggcaattacaccaagatagtattcatatctaaaagcataggaactattgtacatactctgctttgtgatgagattagtggttatgaagttaagcatatttacttaactcctatagataatactttaaaagttggaataaaggaaaagtcattggtgataactggaacggacgatccgttaataaataaagaatctattgaagaaataaaaagaattaatgatgtagagatgattgaaatagaaggggccgatcattcgttaaatataagtaatgatatattgagaagtatagatgttattcataaattaattgaggctgaaaagaaatacttaatataataaaaaacatttaaagaatgtattctttaaatgttttttattctttagaaaattataacccgcattcagcacatgtattaatggaaaatattgtttctaaacataaaagttaaagaatgatattattattttatccaatattgaaagggtgttgaaattggatattaatgatatgcagatattttccgaagggcacctgcctatcgtgtcgggtgtttatgatcaattaaaaattggtaagaaaatagatgaggtagtaagctgggataaagaaaaatgtaaattgtcgccaggtgaagcagtaaaagctttaattcttaatattttaagtggttatgatccattgtacatgatatcagaattttataaagataaagatgtagaaaaactcgtaggcgaaagcattaattacactgaaattaacgaatttgccataggaagaaacttagacaaaatctatgattcagatgctaaaaaagtatattcgcatgtagtcttaacagcattaaaactagaaaacatagacgttaaagctatccactgggatacaacatctaaaagtttttcaggtgattacgaacgcgtaattccagaagtacaggatgataaaaaatatccaattaatattacatttgggcatagcaaagattacagaagagatttaaaacaaatgaagtttggagttggaactaccaaagataaacttccattattctgtgatgtgttaagcggaaatgaagatgataaaaagtggaatggcaatgtaattaaaagaattgaggaagaactttcaagtgttgatttatctaatattcttcacgttgccgatagtgcattagttaccaccgataatcttaaagaaattaatgatgagacatacaagtttatctcaagattaccgggtactttcagtctcgaagcgaagcttataaaaaaagctataaggacccctgaaaagtgggaagacttatctactttaggtaagaataaaaaaagagcaagcaaatatagaatacaaagttttaaggatgttattggtgaaaagaaatatcgttttgttgtatgtcattcatctaacctggctgaacaaaatatgaaaactttggaacgcaatatagaaaaagaaaagagtgaaacaaagaaagcatttgataaagctatttcaagagatggttatttctgcgaggcggatgcacagaaagccattcttaaatttgaagataaactaaaactcaagtaccataccctaaaatacacaatgcaggagaatgaacaaataaagaagcgatctggagtaaaaggacgaagaaaaaaagatgaaattccagaaacagaaaaagtatatatttttcagtacgaattaattgaagataaagataagataaatcaacgtaaagaagaaattgggatgtttgttcttataactaatgagttaaatgaggaaaacttaagtaacaaagaattgcttatggaatataaagatcaaaactctgttgaatcaacatttaagatattaaaatcaccaagttatgtagatgctatatttttaaataagccagaaagaatagaagctttcggctatgttatggttctagcagtattgctaatgaacttaatagaaaggcgaatttgtgaaaaattaaaactagagtctgaagaaataaatcttcttggtagaagaaaaacattttcgcctacggcaacggcattattcaaagtttttgaaaaagttaaagttgtagcaattcctttatgagcaggaattcaaagaattattcccggaggattagataaaaatcaaaaacggattttaaaattatgcggactaggtgaagaaatatatctagaaatcttttccaaaaacaaagatgtataatgggtaagggcattttgccctttgactgtaaaaattttaaagttataaaaatagatgacaatatttagaatacttgtccaatatttttggaaatatattcactaaaattgaattagcacatcataaatgctcaaatggaaagtttggcaatttatgatatgctgaatgcgggttataatgtcagatttaaagaacgtatgtgtgaaatccatgactcaaccacagtcatctgtaatttttgtgaattttattgataaatcattttaggttgaataactttaggatcatatccgttatctttgagagctctaatgattgcttctttgtgatcatggccaaaggtttccattgtgatatcaagttcaactgcactgttacgattaatgcttacaaattgattgtgatcaagtttgattatattaccatgagcttcagcaattaccttagatacattggttaattctccaggtttatctggaagtaaaacagaaacagtacaaatacgttctctttctattaaaccatgctgcactagggaggcaaaggtaattacgtccatattaccaccgcttataattgatacaatttttttgtcttttacatctaagtgctttaaagctgctacagttaataatcctgagttttcagcaagcattttgtgattttcgagcatatctaggaatgctcctataagttcgtgatcctcgatagttatgatatcgtcgagattttgttgtatatatggaaaaatcttagaaccaggagttttaacggcagtaccatcagctattgtatctactgaaggaagagtagttacatctccattctttaaagaaatttgcatgcagtttgcgccagcaggctctacccctataactcttatattagggtttaggagttttgcaagtgtagaaacacctgtagcaagtccgccgccacctattggaactaagattatatcaacagttggcaattcttttatgatctccattgctattgagccctgaccagttgctacgtctaagtcatcaaaaggatgaataaaagtataaccttcttcttcagcaagttttaaagcgtaattgcaagcctcatcataaacatctccatgtaaaataacttctgcgccataggcttttgtacgattaactttcattagaggagtagtggttggcattacaattattgcttttgtgttataggatttggcagcataagctaccccttgagcatgattgccagcagaagctgtcacaagacctttgcttctatcttcctctgaaagcgtgctaatcttatagtatgcccctctgattttatacgcccctgttttttgcatattttcaggcttaaagtaaactttatttcctgtaatatctgaataatagtcgctaaatactaacttggtttttaagattaccttttgcacgatttcatatgcttcttcaaatttatcaagtgtcatcatttttgtaatatcccctttatatgtatattgcttttagctaatagttttatgataacatgttagcattttatgtcaagtaagagtttttaagacaataagttttgtaaatttaaattaaaaggcaactctagagataaggaataataaaaaaataacaagttaagatgatgctgcaatactataatgaaataaatatatttatcaaaaagatatatttattagtattaaagtgttaatagcatttttaacttgttatttctgagcattttagataggaaaaaattcataatatatagttaagacatatgatttacataaagaacttttattattaatgccctttatgcttttcaagctttttcttttttcttaactcgaactttctttgttcttcttgctccttttgttcttttgatttttgtttgcgtacaattttgctttgttcatgctgtaattgtattgctatttgggctttggttcctatgcctttaacattaacctcttttctaatgcttcgttgaagccttttaggattaggtttctttgctggtaatttaaagtcatcagacgatactggcaaactaaaatttagacgatagaattttttcagtatgagttcgtaaacttcctcgtcttttggctctgagccgaaggtaactttgcataccttatattcgccattttcaatactctcaaagacaccaatccaaaatggatcatcaaaaagaactgttaatttaattattgttaccataattaaatcctcctgtagcatataaatttacagagaatggacaaccccaggagggcaggttactgctatattataatataggttctgactaccaacagaaactgtgttttagtatataattcttgtattacattatagattatatactcctctgtaaaattattatatcgtcttctataaaaaataacaatttttacaagaatgaataaatgaaaaaattaaagaaaaaaagactagaagcttattttgtctctaatctttttacgatattgtaccagcataaagttaaacttgcaatttttcaaatatataataactacataattaattgttgaaaagttttgaatataaggtatttaaaaagtcatcattactcacatccttaaaaaaatttctcgtatcaacaactttattttcagatactaagacaaaatgattatttttgttgtctaaatatactataatatttttagggaaattggtattaatcttgactaagttatgcccagttttgattgacgaatttaataatctattttctagaagttttataactaatggatatttactttgtaggagagtgtaagagaaatatttatctttactaccataggaatattcggtttttgcagctaatatactttggttatagtcaatattcggtgatttatctatagtttcgttactgataaaatcagctatatttaaattcaaatctgaataagttgagtcgtagtttttatcatcatttgtatttgataatattctacctgtagtaagagatagtagcaaaaaagcaaaggcaaatatgcatgcgatgtttattgttatgcgagcatttctggaatatttttttttcttaataaattctttaagaagaaaaataattataataaaagtaattactgttataaaaagtgagagaatagaattttctttgtccaaattatctgaaattaaaaataatgttattgaaaatgttgctaataaagataaagtacttattaatatattttttattctcaatactctataagtattatagggtgtaaatccatatttttttaatttccattttgctcttattgaccaaacgattaaattaataagtttaattatattagtagatataaaaagagttcctataaatgctatgaatatggagaaatttgatgaaaggaaatattctatgctatatgtggtttgtgaatatacattgaagataagcatgatagttataaataattcactaagtctgccacgtaatgaagatttaaaaacttgctcgaacttttctgtttcatcagtgtgtattgacacaatctcggtattctcttttgaacagaatacttggatttcgtttgcttggcatataaaatcccaaccagcagcactacaatattctctgtattctaaaagttcattatattttttggaatcataataagaaaatttaccaataacatctacagagtattttattttttgtggttcgatttttttaaatctaaaaaatggacctttaattttagttaataaccagcctttttgggccatgatttcaaggtattcctctactgcagtatattcataatgtgagtaaattaaaaaagttatttttgtatcattaaatatcattgtttttcctccatatataaagatccatctttaatcaaggtattaagtctcgcatattcatcaagcaatatttgcttacccttgtcagttattatataactacgttttctaccttttacttcagtttctcttatgatggtttctttttcgaattttccaagaagggtatatagggtacccgggcctactcttatacgtccttttgatatttctgaaactgcatccataatatctactccgcatcgttcgatgagcaaagctattaatatataatacattggctcagtcagattttgaaattgttctcgtgccatttattatcacctctttaatatcgatactcgatattgtcaatgatgttttacgtatattatccatgtgtgtaataatattacaaaaatgaaaaagcttaaagtaaaatataaaaatagggaactcacaaagaagttccctgatgtaatataaaaataaagctatgtgtagttagtggtagttttgaattaaaatgtgctaaataattttagttgtccaatcttcacaattccaagtttctgttattatatctctatagaattcaggttcatgcgaaactaataaaattgttcctttatattctttaagcgctcttttcaattcatcctttgcatcaacatctaagtgattagtaggctcgtcaagtattaatatattagtttcattatttataattttacaaagtctaacttttgcagcctcaccaccagatagaactcttatttgtgattctaattgcttagttgtaagtccgcatttggcaagagcagctcttatttgatattgagtgtatccagggaattcctgccatacttcttctatacaagtattactgttattgcctctatcttcttgttcaaaataacctatgtattgataatcacctaaatgaacttctccgcttattggttttattataccaagtaaactttttagaagagtagacttaccaagtccgttagctccaaccaatgctattttttgtcctctttccatatataaatttaatggttttgtaagaggagagtcataacctataactaaatctttagtttcaaaaatagctttacctgaagctctagcagatttgaagttgaattctggttttggtttttcttttgaaagttcaattatatccattttatctagcttcttttgtctagacttagccatatttgcagtagcgacattagctttatttcttgctacgaaatcttcaagtcttgcaatttctttttgttgtttttcgtaagcagcttcaagcttctttttattttcttcatatattctttggaattcatcataatttcctacgtatcttgtaagtcttcgttcttcaacgtgataaattaggttgactactgaatttatgaatggaacatcatgggatattaatataaaggcattttcatatgattgaagatatcttttaagccattcgatatgttcttcatccaagtagtttgtaggttcatctaaaagtaaaatatcaggagattgtaataatagttttcctagaagaattttggttctttgtccaccagataaatcatcaacgtctttatctaaccctaggtctaaaagcccaagaccttttgcaacttcttcaacttttggatcaataacataaaatccgttatgatcaagcatgtcttgaattacagcagttctttccagcattttatttaactcatcctcagtacaatcccccatcttttcatataaagaattcatttctgcttctagatcaaaaagatatttaaaagcatctcttaaggcatctcttatactttgacctttcattaatgctgcatgctgatccatgtaaccaattctaacattattagaccaaataacattcccttcatcaggcattagcttaccagttactatattcataaatgtagatttaccttctccattagcaccgataagaccaacatgttcaccttttaataatctaaatgaaacatcttcaaaaatagctctatctccaaatccgtgattcatatttttaacagtaagtatgctcatcaattacctccaaaaaacttataaaatttgcaacaaagtaaaaaaacttctaataataagagaaaaataataagcttataatcactttttgtagttgcatatccctaatagtttaaaggataaaaagccagtatgtcaaagtaaatttaagaaaatttgtgtatattaaaaatataaatgagaagagtattgaaactaaagaaatatttcacaaagtagtaaaaattattaaagttgatatttattaattgctaaaaacacattaggtatagattatggtgatatatttacataatatgttataattttaataataaaattcgtgcgtctataatttaaatgatgttgataattgtttagaaaagttacttaataaaaattttgatttaatgttgttagaaacgaaaagaagatatgttaaaggcataattagatatttgaccaatctgtataagggggaagcaagatggaggatttgtttactgatagattgatattaagaacatggaaagaagcggattacgaggatttgtatgaatatgccaaaagtgaattggtaggtcctaacgctggttggatgccacataaagatgaggatgaaagtaaaaaaataataaaaatgtttattaaaaacgatgaaacatacgctatagttttaaaatcagaaaataaagttattggtagcatagggcttcatgatagaaagcctgataataatttgttgaaactaaatcagaaagaagtggggtatgttcttaatcctagatactggggaaaagaaatagttcctgaagcagtaaaatcattagtggactatggatttaataaactaaacttagaattgatttggtgcgcacattttgattttaacaacaactcaaaaagagtaattgaaaagtgcggattcaaatataaatttaaaaagttagagagattaaaacttctgaataataaagaggtaaccacattgtattattgtatttttagaactgagtataaaataacctaagaatatccacaaatattatgaatttacatgattctgattacaataaaatgtctaaaaaacttttagaataattagttagtaaattaacattttgtttaatagtaagataaaaggcgtgaaattaagctaatggataagaaaatatctattggcttaatttttatatacagataaaaattatttttgtctgtaagtaattaaagattttaagttagccaaatttctataataatattcctattttggggcaaacttttagtataaaaaatttttttattgatattattataaattgcgtaaattattatatgaaaggagatactatgatgttagatttaactaaagaaataaaagaaatggcagaaaaaatgggttatgaaatgaaaggcttggcagaagatatggggaatgaaatgagaaacgtaggagaattagtaaagtcaaaagcagaaaagttgactgatgaaataaagaatagaatgacaagatgaatataaagaagatagtaattacattattggtgtgaatgctatcttctttatatttatttaaaagtaacataaaaaagcagaaatcatattatatagtggacatggttatagggtaaatagactacctcgatctattaatttcccttttcttagtgcaatgggtaagacatcatatttaaaaagaaatttctttatttgatctccccatgtgtaactatctaaatcaccaaagaaagccatcttattattagagaccataccgccgaccccgcctataaaaccataatttagtgaaggtagtagtatatctccaggaggaagcagaaggatgtcaaaatcataatttttaagagaattaaaaatccctttatcactcgtgattaaggctttttctttaacagggagaatagaacattttgtgtaaccttgaggaacatcaatgtgtatttttgaattttgagagtttaaaagattttcatcgctatattttaaagtatgtataaaatagttttctaaaattaaagaatttaaaataatatcgtttggatatgtattggacaatgtattttttgaaacaatataatttatgtcgtttaatttaaggatctctttgaatttttctgagatatttcgttggataattatcttattaaatgaatcattttttagtacatttaattgaatatcaggatgaccatttatggcatcataaacatcattacatttagggactaatattggttttaggtctagtttggaaagactaagtaattcttctttagtaattctataatcgacaaaacaatgcatataaattctccttataagaatgtataactgatatttaaaggcaaaacaatcaatattgaaattattattttaaattatattttgcgctttaaagactgatatgtcaattaagtaactgctaaaatgtataaaaattaatattttatcaactagaaatatatcatatgaattttgcatatcctcaaatttttaatacatactaatattaagaagggagtgaaatccatgcttattttaaaattagcttatagtgaagacttgactttttcccgtgacctgcaagagctaaaagagctactaaagaagaaggagattttaataggatttgttgaaagtatagaaggaaaaactcatataataaagataatttgtgaagaaaattgttataatgaaaaagtaaaagagattattaacttatatgttagtaatattttatatagaatagttattgataattatagaaaaaaggaaatgtttgaatttataacggataattattttttcttaaaacaatctgaaatattagaggttgaagatctaatactaaaggtattaaagtatgaagaagtagatgcaaatgaggatactatattttgtttaaataaaattaattctatggtagaaaagattagagactgcataagtgaaaaacaagagattaatatagatggatttataacttttaggatgagaaaattaagagaggatatagaaaaagttatagataaagtagtagaaagatatatggtggaaaaagaatataaggaatttataaaactactaaagtactttgtagaaatacaggagtgcaaaatagaagaaataaatataatagtagaagataataattatatagtaagagataaggaaggcaaagatttatattacgattttttcagtgaaatcgcaacagatcaaaataaagctgaattaaatatggaagatatattaattagcggactaataacaagtgcacctgaaaatataaatatctatggaaaagaaaaatgtggcaataaagaatttttagatactattcaaaatgtatttggagataaggttcatttttatgaagcaaatagcgactataataaaattgatcaaataatagcaaaaaaatattgacatggattaacaacaatgatatactcatacatgttaagaagaaacagccgtttctcaccctgcagtgttgaatctactagtatgggtttatatggatgtctatacattgagtattgataatttgagacggctatatgccgtctttttattatgtatgtaatttttcggaggtgaaaaatattaataaagatttttctattaatgaagaaataagagaaaaagaacttagagtaattggaagtgatggggaacaattaggtgttatctcatcaagtgaagcaagaagacttgctgaagaaaaagaaatggacttagttatgatttccccaaatgcgaagccaccagtttgtaagattatggactttggtaagtatatatatgagcaatcaaaaaaggaaaaagaagctaagaaaaaacaaaaaatagtaagtattaaagaaataagagtaagtctaactattgaggaacatgatattgacataaaagcaaaaaatgctagaaagttcctattagaaggagataaagttaaaatcagtgttagatttagaggtagagaaatggaacttggtcatataggacaaaagattcttgataattttgcatctaaattagaagacgtctgcctaatagagaaaagacctaaaagagaaggcagaagtatgacaatggttttagggcctaaaaaggcataacttgagaggaggattttaatcatgccaaaaatgaagactcatagaggagcagcaaaaagattcagaaagacaggtacaggaaaacttaagagagctaaggcgtttaagagccatatcttaacaaagaagagttcaaaaactaagagaaatcttagaaaagctggatatgtttcagattcacaagtaaaagtaatgaagaaattattaccatacctataatatagggtaatgcaggaggtttaagtaatggcaagagtaaagagagcgaagaattctcgtaaaaatcataaaaaagttttaaaacttgcaaaaggatactacggtggaaaaagtaagttatataaaactgctaatgaatcagtaataagagcattaagaaattcttatgttggaagaaagaataagaagagagattatagaagtttatggatagctagaattaacgcagctacaagaatgaacaacttatcatattctaaattcatgaatggaatcaaattagctggaatagacatcaacagaaagatgttatctgaaatagctataaatgatccaaaagcatttactgaattagtagaagttgctaagaaacaattaaatgcttagtacataaaatgcggcttatgccgcattttatttttatattcaaatataaataataatattattatttttccataatcctatagttttgaggtgtaaaactttgatatatatagaaagtaaagaaaataatttatttaagaatacaaaaaagcttaaagaaagaaaaaataggactaaaacaagtaggtatataattgaaggatttagattagttcaagaggcatttaaggcaaaggtcgatgtggattacctaattgtgactgaagatgcacgggataaggtagacgaatttttgagcgaatatataaatgatgaaatcaagatttatgaaatttctggaaatttatttaaagagcttatttctacagaaaatcctcaaggaatacttgcggttataaaaatgaatacaatggaatcgaaattagatggagatttttacttgctttgtgacaaggtgcaagatccagggaatctagggactataataagaactgcacatgcagctggagtacaagaaattatattaacaaagggtactgtagatatatataatgaaaagacaattagatccacaatgggatctatattttatattcctattcattatgatgatgagaatctctctttagtaaaagatttaaagggaaaaggttttaatttagtagtgacatccttagatacagataaaaatttctttcaagcagatttaagaggtagggttctcttaactgttgggaatgaaggaaatggagtaagtacagaagtattggagatggcggatactaaagttaagataccaatgccaggcaatgcagaatctttaaatgtagcagtggcttcatctgttataatgtatgagaaagtaagacaaaatcaattgtgattaaatcttattaaaataggaaagtatattaataggttcctaggaaaatttgaaactatttaagaatgaaagtagatttgaatatttctaggaatctatattaatatgaaaatattttaaaatgcatatatttatctatgtaaatagaaaaatatataaatatttataggaaatatctggtgttcagagtctttaaatttaaaataatcatgttaagatgaaatatttaatttggaaatatgcttatgaatatggtatattagaaagcagtggatttatatataaattttgaaaatagtattgatattttatatatttatttgtataatgagttgtattaattgaacattgaaaaactgtgaatgagagagtagatattagaaaagttttaagggagagaaggtcatagactgtaagccttcttaaataatataatattgaagttcgctcaggagttctagctgtgaaatttatagtagtagctagcggcaaaaagagtcgttaattaaattgagttgggtactttttttagttccaattagggtggtaacgcggataattcgtccctttttatgaggtggcgttttttttatgcaaaaaagtcttttcgattgccaatttacaataaacgattttgaaagaaatatttcttatataaggtgcaatcaaataaagctttatttggagtttgctataattgagcactgaaaattgtgaattgtgaattgtgcattgtgtattgacgttattgaaaggagaaacaatgatgaaagaaaaacttaaagaattacaagaacttgcgttaagcaaaattgaagctgttaaaactagcagcgaattagaagaaattagagttaagttcttagggaaaaaaggggagcttactacaatattaagaggtatggggaatctttctccagaagaaagacctattgtaggaaaattggttaatgaagctaaagctgttgttgaagaaaaattagaaagcgtattaaaggctattaaagataaagaaaaggctgaaaagcttgcaggtgaaactatagatatttctcttccaggaagaaagaaagttataggaaagaggcatccgttagatttgactcttcaaagtatggaagaaattttcgtttcaatggggttcacaattgaagatggacctgaagttgaatatgatcattataattttgaagctctaaatatacctaaggatcatccggctagaagtgaacaggatactttatatataaatgataatatagtacttagaactcagacttcaccaattcaagttagaactatggaaaatcaaaagccaccaataaagatgatttcccctggtaaagtatatagatcagattcagtagatgctacacattcacctatattctatcaaatggaaggattagttatagataagggagttacatttgctgatttaaaaggaacattagaattatttgcaaaaaaaatgtttggagacaaggttcaaactaaatttagaccacatcacttcccatttacagagccatctgctgaaatggatgcaacatgctttgtgtgtggcggtgaaggctgtagagtatgtaaaggcagcggttggatagaacttttaggctgtggaatggttcatccaaacgttcttaaaaactgtggccttgatccagaagtttatagtggatttgcttttggttttggtgttgacagaatggtaatgctaaagtacggaatagatgatataagattattatatgaaagtgatatgagattcttaaatcaattctaaaagcttaattttatttaagaatttaagaatttaagaatttaagaatatacattcttaggaatatttattctttagaatattaccatatatattctaaagatatacccatatgaaaaaagcagctatgctgcaacaaagaacttattaaccttaaaaaaagcagctatgctgcaattaagattttttgaatattaaaaagggtgtagctattctaccaattaagaacttttgcacatgtaaaaatgagggggagtgaagaaattggattaaaataagatgctatacccagcaataaaaggaggaaacaaaatgaaagtaccatataattggcttaaagattatgttgatataaatgttagtcctaaggaattaggagataaattaactctaactggttcacaactagaagaacttgttatccaaggagatgtaattcaaaatgtagttacaggaaaaattactaatattgaaaaacatcctgatgcagataagttaagtatatgtcaagttgatataggaagtgaacaaatacaaatagttacagcagcaacgaacatgaaagagcaagatgttgtgccggttgctcttcatggttcaacacttgccgacggaactaaaataaaaaaaggaaaacttagaggagtagtatctaatggtatgttctgctcagaagaagaattaggtacagctggagatgagccggttcatggattaatgattttacctactgatactaagctcggagttgatatcaaagaaattttaggattaaataaagcaattctagattttgaaattacttcaaacagacctgactgtttaagcatggtaggtatggcgagggaaacagcagcagcgcttagaacaacttatagaatgccaagtttagagtatgaaactaaaaattcaaaaaatataaatgaagagttaactgttgaagttaaagatactctttgtaataggtatatggcaagaggagttaaaaatgttaaagttcagccatcaccaggttggatgcaagaaagacttcttgaagctggtataagaccaataaataatatagttgatataacaaactttgttatgcttgaaactggtgaaccaatgcatgcttttgataaaagagaaattgctacgaataaaatagtaattgaaagagcaaatcaaggagaaaagtttacaactttagatgaagtagaaagagaattagatgattcgatgctttgcattaaagatggagaaaatattatcggtcttgctggaataatgggtggtttaaactcagaaataaaagaggatactacagaagttgtttttgaatgtgcgaattttgatggaactaacataagagtaaactcaaagaaattaaatctaagaacagaagcttcgggaagatttgaaaaagatattgatcctaatttagctgaaattgcattaaatagagcatgtagcttaatctgtgaattagatgccggagaagttatggaaggtactatagatgtttacaacaacaagaaagaagtatcaactgtaactgttgattccaattggataaacagcttccttggaacagatctttctaaagaagagatgaagagatgtttagatagtgttgacttatttacagaaataaatggtgataacttagttgtgactgctccaactttcagagttgatattgcaattagagaagatatagctgaggaaattgcaaggatttatggatatgaaaaaatccctacaacaatttttaaagtttctacagaaagagagccaagatatagaaaaggattattagataatagagtagtaatgcttgctacaggaagtggcttaaatcaatctattagttattcatttgtatctccaaaggtttttgataaaattaatttatcagaagatagtgagcttagaaatgtagttaagataagaaatccattaggggaagattatagtgtaatgagaacttcaacacttccttcaatgatggaatcacttggaagaaactattctagaaataactcatatgtaagattgtttgaaatggggaaagtttacattccaaatgaggatgaaacaaaacttccaacagaaaagaatattttaactataggtatttatggagaatgtgactacttagatcttaaaggtgttgttgaaaatataactgatgggttaggtataaagagtgttaaatatgagagagagagcgaaaatgtaagttaccaccctggaaaaacagctaagatagttgttggtagaactaatgctggaactttaggagaagttcatttagatgtatgtgaaaattacggtctagatgtaccttgctatgtagcagaattagatttagatgttttatatgaaaatgctgatatggataaaaaatataaagcacttccaaaattcccagcagtaacaagagatattgcattacttgttgatgatagtcttttagttcaagaaattgatgatacaataaaaagagctggtggaaatttagttgaaaaagtagaattatttgatatatataaaggaaagcaaattccagatggtaaaaagagcatagcttatgcaatctggtacagagatgaaaataagacattaacagataaagatgttaataaagttcatgaaaaaatcctaaaatctttagaatataagcttggagctacattaagagattaaggtataataactcaagttttgctaaatgaaagctgcttcagaaataagtcttattatttttgaagcagctatttttatttatgcaaaaaaatataagtttaaagaaggaaatatcatgtttctatagaataagtatagataaagtggttaaaagtggtgttaagtggtttaaaatagagggaaattacctaatcaataaaagtaggagctgagaatattgttcattggggaatatcaacatgcgttagatcctaaaaatagaataattgttccagcaaaactaagagatggacttggtaataaatttgttattacaaaggggcttgatgggtgtttgtacgcttatccacttgatgaatggaaaatattggagaataaattaaaaactttacctttaacaaataaggatgctagatcctttgtgaggttctttttttctggagcttgtgaagtcgagttagacaagcaaggaagaggattgattccacaaaatttaaaggaatatgcaggtatagaaaaggacatagtaagtattggagtattatctagagtagaaatatggagcaaagaaaagtggagcgaatataacgaatcaaatatagactttgattcaattgcagaaaaaatgaatgatttaggaatataaggagtttttattatggaatttaaacatgtatcggtcttattgaatgaatgtatagaggcattaaacataaaggagaatgggatttatgttgatggtactttaggaggagcaggacactcatctcatatcttaagcaatctttctaaagatgggatgcttattgggatagatcaagaccaagatgctctaaaagcagcaaaggaaaaacttaaggattttgaaaatgtaaagtatgttcatagcaatttttataatattgatagtattttaaacgatctagatatcgaaaaggttgacggaattttgatggatcttggagtttcatcatatcaacttgatgaagcatcaagaggttttagctatatgcaagatgctccgttagatatgagaatgaatagagaaaatgatttctcagcgtacaatattgtaaataattacgatgaggatagcttatataaaataataaaggactatggtgaagagagatttgctaaaagaattgcgaattttattgtaaacagaagaattgagaaaccaatagaaacaacttttgagcttgtagatattattaaagctgcaattccagcaaagatgagaagagaagggccacatccggctaaaagaacttttcaggccattagaatagaggttaactcagaattaaagatacttaataaaactatagaggatggagtgaatagattaaataaaggtggaagaatggctattataaccttccattccttggaagatagaatagtgaaattaaagtttagagaattagagaatccatgtacttgtccaaaagaatttccaatgtgtatctgtggaaaattaccattagttagaaatatagctaaaaaaggtattgcaccaactaaagaagagattgaagaaaatccaaggagtagaagcgctaagcttagagtaattgagaaattataattattattatgttataaatgagttgggatgtgaataaattgggaagaagagaatatgattatataaaagggaatacagtattagctccagaaagaaaaacaagagtacgtaaaccggataaaaaatataaacaaatacaaagaagaaaacaaattataagcaaaaatattctattaaaaaacaggagaaaaaatgataggaaatacttactgactgtggcagttgtcatatttagtttagggtttattactattcatggggataacaaggtttatactatggaaagcaatgtgagaaacttggatactcaaataaaacaaacacaggaagataatgaggcattaaaagtaaaaatattgaaattttcttcattaaataatattcaaaagaatgctgaaagtaaattggcaatggctattccaaaaaaagaacaaactataaaagttgacttttcacagaattattttgaagatttaaaacctaaaagttccgaaaatactgctaaaagtaagaacatattctctaaaataataagttacttaaaataataaaaaataagtaattatggttaggaaattaatggctttatcttggttctttcgggttttatgtaaaagaaagtgtgcatgggggaaataaaagttgaaaaaaaagaattataaagatagggcaaaaatgcgtcaaaggatgagtatagcagcttttgcgttgacaattgtttttgtaatattaactcttagactttcttatataatgatagttaaaagagcagattatgcagcaagagcagaagaacaatggacgagtgaggtaaagatagatgccataagaggaaggatattagataggaacggtaaagaattagcggtatctgctaatgtttatagagtagatttcgatttaaattctataagagcatatttatcaagagggttaaaggatctatcaaaaacagatatagataatatgaaaagtgtaggaattccaataccttctggagatgatggattaaaaactgatgatattgcgcctgttattgcaaaggcattagatttagatgtagataaagtaaaagataagcttgaaacaaggcttccaagtggagcaaaggctggatctgctactttagttagaagaatagaaaaagaacaagcagataaggtaaaagaacttaatataagcggtgttttagtatctccagatactaaaagatattatccgaataataatttcttagcacatgtactcggaagtactaatgttgatggtaaagggcttacaggagtagagcttcaatacaattcatacttatcaggaattcctggaatgaagattgcagaacttgataaaaataatagagatttaccttatacaatatctcagtttacagcaccggtaaacggtaaagatgttacacttacgattgatgaaaatatacaaaattttgcagaaaaagctgccatacaagcttataatgatacaaaagctaaagcagtatcaattcttgttatggatcctaaaacaggtgaagttttagcaatggtaaataaaccggattttgatcctaataatccacgtgatggtgcagataaatttgatggagcaagttcagatgacaaagtacaaaagatgtggagaaataggttggtaaatgatacttttgaacctggttcaatatttaaggtagtaacagctattactggccttgaagaaaacattgtaaataaggatagtaagttttattgtggaggttcattaaaagttggaggaattactcctaagtgctggagaactcagggacatggagcagaagtattcccagacataattcagaattcatgtaatgtaggctttatggagcttggggcaatgattggaaaagaaaaattatgtgaatatattaataaatttggttttggaaaagctagtgggattgatttacctggagaagcaaaaggaattgttaaaccagttgataaggtttctgaggcagatcttgctacaatttcatttggacaaactaatacagttaactcagttcaatatatgactgcgtttaacgctattgctaatggcggaactttgatacaaccgcatgtaatgaaagaaatcactcatgaagatgaaaataatgttaatattgtcgatgaaacttttaagcctaagacaacaacagttgcaagtactgaaaagacagcagaacttagaagttatcttgaaagagttattacagggggatctggaacaggaacatttatagaaggttaccatataggaggtaagacaggtactgctcagaaagttattgatggaagatatcaagaaggtaagtatatatcttcatttgttggaatggctcctgtggatgatcctaaaattactatgatggtaactattgatgaaccaagtaatggtgcttattatgctgcacaagttgctgtaccgccagcaaaaccattatttactgatatttttaattaccttaataacaaattttcagatgaaaatatgggacaaattactagagatgttattatcccagaagttagagggatgaaagttgatgatgctaaaaaagcgttgaaggatgcaaagttagattttaatatagatggtgatggggagtcagtagtgaacttaacaccatatccaggatattcggtaaaggaagggtcaaaaataaatctttatacaagtagtgatggaacaaatagtaataatgttgtaatgcctgatgttaggggatattcaaaggaagatgctaatacactattgaagaagctgggaatagtgcctgtctttgaaggaagtggagcagtttcagaacaagatatttctcaaggtgaagttataacaaagggaacaactgttaagttgaccttaagttcagactataaggattaaaaaagtgagaataaattaatacgaaaactttaaaacgaagtaggtatgttttgtaagaagtttagtatgaattatacaaatgaaaaaatattagtatgtgagaattctcgcatactaatattttttagtaataatatgcgttatatatttaggtatcctattagaactgttaaaaccaatacttatctaataggtgaatatttaaattagtgttttattcagaggaaaataaatggaggaacaggcattgaaaaagaaaaaacatgtaagtaaagtaaagatacggaagagaacaagaagtgttgctttttcattaacagctatttttgctatattaataattagactctcttatatagtgatggttgatggaaaagactattcagcaagagcagaagaacagtggacaagtgaagtgaaaatagatgctaaaagaggagaagttctggataggaacggaaatgaactggctgtatctgctaatgtctatagagtggactttgatttaaattcaataaggaattacttgaaaagaccagcaaaatctatttcaaataaagagcttagccatatgaaaagtgtaggaattcccatccctacagaaggaagtggcctaacaaacgatgatattgcacctgtaattgcgaaagtattaaatatggatgtgtcagaaataaaagcggatttagaaaagaagcttccaagtggtgcagatgcattttctgtgactgtagcacgaaaaatagaaaaagatatagcggataaagtaaaagaacttaatataaatggaattatagtttcacaagatacgaaaagatattatcctaataataattttctatcgcatgttttaggaactactgatcctgatggcaaaggattaagtggtgtagaacttcaatataattcatatttatcaggaattcctggaatgaaggttgcggagcttgataaaaataatgaagatttgccttatacagtttctcaatatacagaacctgtaaatggcaaagatgttactttaactatcgatgaaaatatccaaaacattgttgaaaatatagcacaaaaggcctataaagatgataaagctaaagaagtttcgatattagtaatgaatcctaagactggagaagttttaggaatggtaaataaaccagattttgatcctaataatccatatgatggagcaagtaaatttgatggagcagatttaaatgataagatacagaaaatgtggagaaataggttggtaagtgatacttttgaaccaggatcaatatttaaagtaatcactactatatctggtttagaaaacaatgttgcaaacaaagatacgcaatttgtggataatggatcaatatctgtaggcggaattgtagtgaaggatgcagaacgggaaaataaacttcaaaatttacttcaaattattcagaattcatcaaatgtgtgttttgtaaaattaggacaaatgattggtaaagacaaattatatgaatctattaataagttcggattcggaaaagtaagtggaatcgacttgccaggagaggcatctggaattgtgaaaccaattgataaagtttcggaagcggatcttgcaacgatatcatttggacagactaatacagtaaattcggttcaatatatggctgcatttaatgctattgctaatggaggaactctaattcaacctcatgtaatgaaagaaattactcataatgatgaaaataatgttaagattgttgatgaaacttttaaacctacgacagctacagttgcaagtgcagaaaagacagcagaacttagaagttatcttgaaggtgttgtaactgggggaacggcaactggaacttttatagatggatatcacattgggggtaaaacaggaactgcagaaaaggttgttggtggtaagtatggagaaggcaaatatatatcttcatttgtgggaatggctccagctaatgatcctaaagttacagttatgataactgttgatgagcctagcaatggtgaatactatgcttcacaagtagcagtaccatatgcaaaactattgtttacaggtatctttgactatttaaatagtgcatcttctaatgagaaaattgttaaggatattattattccagaagttagaaacatgaaagtttcagatgctgagaaagtattaaaggataaaggcttagattgtaatatagatggaagtgaggaaacaatagtaagtatgaagccatatccaggttcatcagtaaaggaaggttctaaaataactctttacacaagtggggatgcgacttataataataatgttgtaatgccaaatgttaggggatattcaaaagaggatgcgactactttattaaaaaatcttggaataacagcaacttttgaaggaaatggagttgtttcagtacagaatatttcagaaggtgaagttatacctaaaggaacaactgccgagttgattttaagttcgtattatgaagattaagaataatggtagatatataggaaatttaaattaaaatcgctttttgcggaaaatttaaagtgaattggcgaatgatgaaatactagcatgtggggatgctcgcatgctatatttttttatcatataagttctaattaatagctttcatagttcataaaatcattacatacaaaataaatcatattcgctgagattagataataattgtgcatttaattttcttaaacgtaataattattaatataaaatataaattaaaatattcatatacgataagttaattaggaggaattcaatatgaatttgaaaagtattttaaaaggaatagattttgaatcaattcagggtgatattgatattgaagttaacaaaataaactatgatagcagaaaagctggcattgatgatgtttttgtctgtataaaaggatatgcaactgatggccataaatatatagaaaaagctattgaaaacggagcaaaagttatagtaatccaagatgatatagaaataaaggatgagaatattgccattattaaatgcaatgatacaagaaaagcattggcattaatgggggcaaattattatgataatcctagttctaaaatgaagataattggagttactggaactaatggaaaaactactactgcttttatgattaagcatattttagaagaaagcaataaaaaagttggtcttattggaactattgcaaattttataggtgatgaaaaaattcatactgaaagaacaactccagaatccttagagcttcaagaattattttctgaaatggttgataaaggtgtagagtattgtgttatggaagtgtcttctcattcattagcattagatagagtttatggtattgaatttcaggttggaatatttactaatttgactagagatcatttggattttcacaagacttttgaaaattattacaaggcaaagtttaaattgtttgaaagatctagaataaaaattgttaatgttgacgataattacgggagacaagtaattagtgatttaaacaatttgaaatgtaatgatatatattcattctcagtaaaaagcatttcagattttaaagcttttgatgaagaaatgggaagtagagaaatcaaatttaagctcaacttgaaagaagatgagcaatttattttaaatataccaggtgaatataatatatataatgcgttaggtgcaatagcagcatgttttaaattaggtatgcctataaaggatattaaaagcggcattgaaaatgtagtagttttaggaagatgtgaaagagtagcaaaagaatataatttaggttatgaaatcatcatagattatgcacatactccagatggtttagaaaatatattaaagacagctaaggcttttacaaaaggaagattgatatctgtatttggttgtgggggagacagggataaggtaaaaagacctgaaatgggtaaaatatctacagatattgcagatattacaattgtaacatccgataaccctagaagtgaagaacctctaagtataataaaagacattgaagctggaattgacaaagataattattttgtaatagaaaatagaaaagaagcaataaaaaaatctatagatatagctcaagataatgacgtaatagttattgcaggtaaggggcatgaaacttatcaagtattgagagatgaaactatacattttgatgaaagagaaattgtaaaagaaatattagatagcatgaacaattagggatcttattcataatgtaacaatgacggatttaagcgatatttaggattgttattttgttgatgaagttaacaggaaaataaggggtggatgaacttggatttaaatttagcggaaataattaaggcagtggatggggaaataatagttaaaaataacgaaggtatttttaataagatttcaactgatactagaaaaattcagaaggataatttattcattgcattaaaaggagagaattttaatggtaatgattatacaatacaagctatcgaaaaaggggcatctataataataattgatgatgtgaagtttaaagttgaagatttaaataataggggaactattattaaagtaaacgacactaaagaagctttaggagatttggctagattttacagaaagaaaattggagtaaaagtagttggaataacaggatctactggtaaaacttcaacaaaagatttagtagctgcatttctaagtggaaaatacaaagtttttaaaactcaaggaaatttcaataacgaaattggattaccacttatgatatttgaactttctaaagattatgatatagctgtccttgaaatgggaatgagtaattttggagagataaataagttagcgagtattgcacttccggatgttggtgcaataactaatattggagtggctcatatagaatatttgaagactagagaaaatatacttaaagagaagatgtctataacagatttctttgaaaacaaaaactcattaatagtgaactgtgaaaatgatatgctaaaaacaatagttgagtgtgataagtttaatttagagagagtaggttatgattcaagttataatctttacgctaagaatataaaattaacatctgaaaatacttcatttgatgtagttactgatgataataaaaattatagatttactctaaatatggtcggagaacataatgttttaaacgcacttataggaatacaaatagcaagaaattttgggttgacttttgaagagatggaaaaggggttagggaattttaatgctacttctatgagacttgaagttataaataaagataagtttactattataaatgattcttataatgctaatccagattcaatgaaagctgcacttgaagtgctaaaaaattattctggatcgagaaaaatcgcggtacttggaactatgggtgaacttggagattatgcagaagaagcacatatccaagttggtgaatttgcgaaagataaagcagatattttattgactactggtgaatttaaagagtattataagaaaggctttggagagcgtacaatggtgtttgagagtaaacaagaattaatgcagaggttaactgatatgattaaagtaaatgatactattttaattaaagcatctagaagtgcaaaatttgaggaaataaccaaatatctatagaatttaaaataacacgaaggaggtgacttgccttaattaggatcttcaagaaaataattacctagcatgattattttctttcggatattttaggcaacactggatgggggaagcaataaacttattaattaactcaaaaattttagcaccactaattatggggttcgtattttcaatagtacttggaccaatatttataccgatattacacaagttgaaatttggtcaaaatataagaaaagaagggcctaaaagtcatcagaaaaaatctggaacaccaacaatgggagggcttatattttttatagctacagctacagctatattaatcatgggtcaaaaacctatgagtagagaaatgatattactttattcatttttagcttttggatttattggatttttagatgatattttaaaaataattcataaagataatctaggattaagagcagcgcaaaagatgattttgctagtcttattttcagtagctttagcatggtatggatatacaaatgtgggtacagatattttgattccatttataaatcaaaattttagattgaatttaggaatgctatacataccatttatagtagtatattatgcagcagtaactaatgctgtaaacttaactgacggaatagatggacttgcaacttcagttacggttatagtgttaactttctttgctatcattggttttagaacacagaatgttgaagtagcagtttttgcaatagcattagctggagcattacttggatttttaaaatttaatgctttccctgcaaagatatttatgggtgatacaggttcgctagctctagggggagttatcggaacaatagcattaatgttaaaaatggagctgtttgtgattatagttggtggaatatatttaattgaaacattatctgttataattcaagttacatcatttaaattaacaggtaaaagagtatttaggatgtctccaatccatcatcactttgagcaagttgggtggagtgaagtaaaaatagtaacgattttttcaagtattacagcgattttatgtataattggctttgtagcactttagttaagtagtagatttggaggatttatgtatgaaggtcattgggtccaaaagaaaatcaaaaatgggtgaaatagattatggaatattttataccgtagcattacttttaacaattggtgtggttatggtatattctgcaagttcttattatgctatgtttatgtataaagatagtatgttttttctgaaaaaagaattaatggcaggtgttgttggagttatagcaatggcagtagcgatgagtgttgattatcataagataaagaaatatacggctataataatgatagcaactatacctatactattagcagtgtttctttttccaggaactaatggagcgcaaagatggattaatttagggccattaagctttcagccatctgagcttgcgaaatatgttgtagtactctttttagcaagaagtcttgaagtaaaaggggaaggtgtaaaagattttaaaactggaatagttccttatttagctacatcaggattttatgcagctattgtattagctgagaagaatttaagtatagcttcggttataatgatagttacatttcttgttttatttgcagctggtggaagaataaagcacttatttggaattgttgcgccagcattagttgcagcagcagttgcatttacagtattagaaccatatagaatgaaaagattaatgagttttacaaatccatggaaagatccaataggagatggatatcagcttatacaatcattttatgcattaggtgctggaggagttacagggcttggccttggccaatcaaggcaaaaaactttgtatatgccagagccacataatgattttattttctccattatcggcgaggagttagggcttattgggtgtatatgtataatattgctttttgtaatatttgtttggaggggaataagtgtggcgatgaaagctagagacacatatggtactcttcttgcaataggcataactggagttgtagcagttcaatctttaataaatattgcagttgttacaggatcgatgccagttacaggggttccgctaccgtttattagctatgggggaacttcattagtaataaatatgacggcaataggaatacttttaaacatatcaaggcaaactgaaggaaaagatgaatttaaggaaatataagaaaatacagggcaaagaattagaatacaaatctttgccctgtattttttaggtaattatttaaagtagttttaaattttagatgaaaatatatcgttaaagtggtattattatatatgaaatttatactaaatattataaaataataagtgtttaaatatataaggcatagataagaatagggatgagtatggtaaaaacgaataataataaattgattttgaggtcacaaagaagaagactaataaggaaaataattatgactattatagtcctatttatagtgggaacaatttttgcaataaaatcgaattttttcattattaagaaggtttctattttaggtaatccagtaatgagtggagaagatgttaagaatagtacagagaatctaataggacagaatattctattcataaataaacaaaatataataagcaatgctaaaaagaatccatacgtagaaaatgttgaaataagcaagtcgtatcccaaacaagttaatataaagatttcagaaaaagaaggggtatattatgttgaaaaagatggatataaatatgttttagataatgatgggaatttgcttgaaaaaacagatagcgttgaaaatagaagtttagttaatgttaaaggaattgatttaaaagatgtagcgctaggacaaaagatgatagatgacaatagagtattagattttttagatattttttatcagattataaagataaatccgacaaattataaaatagattatgttgatataagtgattttactaacataaaagtatatgttggcaaagtagaaggaagacttggtaatgatgaaaatataccagataagatgaataaattattacatataattcaaaatcctgatatagggattgttaagggatatgtagatgtaggatttaatggtgcgcctgtatattataaggaagaaaggtaggtaattaatgaagatatctagatcacaattatttatagcaattgtttgtggacttttaggctttttattggcatatcaatttaaggtattatcaaataagaatatagagtcaaaaatcagtaattatgataaaaacgatattatttcagaagttgaatctctaaaaaaagaaaaagaagaattagcgtcaacaaattcaaaattatctgatcagttaaaacaaatggaagaaacagcagccaaaaatggtgacatggggcaagatataaaaaatcaacttgatgaggctagaatgcatttagggatagttgatgttaaagggcagggcattgttcttacaataacacctaaaacatctatttttggctctacgacaaatgatagtagcagagatctaggagaagatgaattggttcatatagttaacttactttggtattcaggagctgaggcaatatctataaatgatattagaataacaccgcaaacaggaataaaaactgctggaaatggagtagccataggttcgacagggaaagtttatcctagagataaaattataattaaggcaattggagacaagggcagacttaacgttggaatttctttcccgggttcattagaatatcttgctcttcctaactataataatgaagttaaatcagaagatgatatatttataggaaaatcaaaacagtcattgaagagtgactttattaaatcagttaaagaataggagagagttaagttgatagcaattataggactactaatcggaataatacttggatttgtattagatgttaatatatctgataaattgtcaccatatatgtctgtcgcaatactagcatgtttagattcagtttttggagcagtcagaggaaatctctctaaaaactttcaagcagatatatttatatctggcttttttggaaatgcattacttgcagcaggacttgcttatttaggtgataagcttggaatacctatatatatggcggcggtaatagtttttggaggaagaatatttgataacttcgcaataatacgaaggctattattagaagaatttaaaataagaagaagaaataggtctagaaataattctatagataaagaaaatcatgatgataaatagagaggtgatgtgatgaaaaataataaaggttttttctttgttttcattgcaaccataatattaggggttttaatatcaatgaattttaattttaaaggtattcagtcctatagtcaattaaatgcaacagagtaccaaaatgccgttgaagaaagggcagcattatatagagacattggaaatcttcaagaagataataatgagaaaaaagataagattaggaattatgctcagaatgataaaaagaatgataagatccttgatgatatgaaaaatcaaattagtgattataaatcatttattggatcaaataacgtagagggaccaggaattatacttaagataaatgatggaactacaaatgctcttgaagaaaatacagatgaaataaataataagcttttacatgataatgatatggctcttgttttaaatgaacttagagtggctggagctgaggcgattagtgttaataatcatagaatacttccgtggtctggagtaatttgcaactgggcattcttggggtttgatgatggtggaatggagtatgctccttttaatatatatgccataggagatccggagaaattgaaggcggctttacttgaagatggaagccatgttaaacaattaatgcttagaaaactttatgttgatattaaagttgtagataaaataatcatgccaccaacaacagcaaattcaaatgtaaaatatatgagtagagatgaaagtaaaaaatgaaattaattgatatttaggaaggaaattttaagtttatatagaatattatacaaagtgataaagaaaggaataatttagtaaggtgttatagtatgggaattaagcaaaatattgaagaactaagatccaaaattccagaacaagtaacgctcttagctgtttcaaaaacaaagccattagaggatctagaagatgcatatatggcaggaatgagagattttggggaaaataaagttcaagaattagtaaaaaaatctgaaaattttcatgaggatgtacgatggcattttattggacagcttcaaagtaataaagttaagtatttagtagataaggtacatttgatacattctttatctagtattagtttgctaaatgaaattgaaaagcagtttagtaaagttaacaaggttgctaatactttaatccaaattaatattggaagagaggaaagcaaaagtggaattttggaagaagatttatatgaattcatagaagcaattgaaaaatgcaaatttgtttctgtaaaaggtataatggttattattccaataggggatgaagaaagcaatagaaaatattttaagaaaacaaaaaaaatatttgatgagcttaaggaaaaaaattataataatattagtatgaaaatattatcaatggggatgactcatgattttatgacagctatagaagaaggttctaacttagtaagaataggaacaggaatatttggagaaagaaattataatttaggaggcgaaaataatgggtaatgttatatcaaaagttaaatctttattagggtttgaggactacgaggagtatgatgaatacgaagaagaacaatacgaagagcaggtgaaggatgaagatgagatagaacctgttattaccaataagaagaatagtaaagttgtaaatatccatacatcttcaactacaaaagtaacaataactaagccagtggattatgaagaggcaactgaaatttgtgaagcacttaagaatagaagaatagttttagtaaatacaacagttttagaactaaagattgcacaaagattattagattttatcagtggttcatgttatgctttaggcggagaattacaacaaattgaaaagggagtatatattctttcaccatcaaatgtagaagtaacaaatgaattgaaaaatgaactaagttcaaaagctctatttaattggtcaaaataggaggtataaattatgatatatagtgtttacatagttcttgatatgtttctaagcatattagagctagctatattcatagaatgtatagtttcgtggataccacaaattcaggggaataaatttattgatttactacacagttttgttaatcccgttttagaaccaattagaaagttacaatatagattaagtcctggattaccattggatttttcacctatatttgcattgattattataaattttttacaaaggattataccataaattatgaaagaaaaaatagcaaagtattttacagatgatgatagaaatgatgcattgaatttatatgagaaatatttactagctagagataaaaacataactgtatttggaaaaaatttttatacaccaaatatatggatgtggtttgagaaaaacctctctagcaatgatttgaaaattgaaagtaatggacttttagatgattctgaaagaaggatggtttcttttaataacatatataaaagtccatttcctatgaaattgattaaaattgaaagtacttcgaaattttctaatcttactcatagagattttttgggcggaattttatctctaggaatagaaagaaataaaataggtgatttgttagtaaataataatacatgttatgtgccagttcacgaagaagtagaagattttattatatataatttaaacagaatttctaaggttatttgtaatgtaaaagtggtggatgattttgaatttttaccaaaagttaattttgaagaagtagtagttttagtttcttctttgagaattgatggaattgtttctaagattataaatatatctagatctaaagctcaagcaatgattgaacagggtcaagtgcttatagattacgttaagataaaaaataagagttatgaactaaaaggacaagaaagaattactataagaggttttggaaaatttatagttggtaattctgttggaaatagcaaaagtggaaggataaaaattattatcaaaaaatatacataatagaggtgaaagtatgaagttgacaccaatggatataaacaacaaggaatttaaaaagggattaagaggatacaattctgatgaagttgatgagtttttggatgaagtagtagataactatgaagagctttataaagaaaatgcaaatttaaaagagaaacttgctaatttgaatgaaaaggtagagcattattctaaaatcgaaaccactatacaaaatacattgttattggctcaaaatgctgcagagcaagcaaaaaattcggctaaaaaagaagctgaatttatgataaaaaatgctaacgaaactgctcagaagattatggataaggcacataatgatgttattcaagtaaatgatgagtatgaaagagttaaacaagaatttattaaatttagagcaaaatatagaaacttcatgaatgcacaattagaaacatttgatgatttagagaaggattttataaaaaattataatgtatctgatcctatagaagatgatgaagtaactaatatagaaaaaatagttgaaaaagaagttacaagtactacgagtggattaagtgaagatatagaagcagaagaaaatgatccttcactgaatgatgaattaaatgagattaaaagtttttttgttcaaggtgaataaatttactatagtacagaaataatgaacaaaaattatacatattttatttacataacgtaataaaatgaagattatgtatttttgaataatagaaaagctatcctaaagcgtttaaggatagcttttctatatttgcttaattacagataaccaaactaagacctgaacttatgcatataactcgccgaaatgagtaaaatacatttgttccagtttctgggtaattctgatgggtgattctaaggctataaagttgcacccaaagtgctagcctcaaagagcaagctttgaactagcacatttggaacaacttatagccaaagaatcacatccatcaaaattaccaatgaaacattccacaaaagcattttactcatttctggttggaatatattttatagtctaagtagagtttgtgattgtgttatctataatattattcttttgggatttcagaattattaaatttagtatttagtattactatatcaacccttctgtttgcagctctgccatcttcggtattgttatctttaacaggtctatactctccgtagcctactgaagataatctctcgggtttaacgtttcccttagaaattaaaaactctactacatttgcggctcttacagctgaaagctgccagttagaatgaaaataatcattattaatagcaacgttatcagtatgtccttcaacatgtatatagttatcgatatcgtttaaaatctttgaaatggatattaatttaccttgccaatcaggttttatagtagattgtccactattgaagaatacgctatcattgaaacttattatgagtcctctttcttgaatggatgtagtaacacttccttttagctcggaattatttacaagatcatctactttcttttttacatcagataatttttcttcttctgctatagagtctgaattattctgagtattttgttgatcaattacagtaggaggagaatttgaactatcagatactgctattatattttctccattaccactattaaatccaattttcaatgaatttgctagggtttgagattttttagtatccacattagaaatagcatacatcattaaaaagaaaatcatcattaatgttataaaatcaaggtaagataacatccatctctcagtatcatctttttctttttttgtattctttttcataattatacctctttaaatttcttctaaatctttagcttcatcttcggttagatagctaacaagcttactcactaaggtatttggattaactccttcttgaatgagcaatactgcttcaatgatcatttctttttcagcaatctcttctttatttatttctcttaatttacttgctataggaagccaaaaaagatttgcggtagcaagaccatatagagtagctacaaatgcaacagcaattttttcacccattgcagctacatcacttaaagcgctcaatattataactaaactcgttatggttcctacgattcccatagtaggagcataaccacctgcagaggtgaacatttcaatacaattttcatgtcttgtagaaagctgctcgagcttggtatttaagatgctttttacagaggatggatctataccatccacaaccatttgcagccctttttttacaaatggatctaaggaattatctgttagctcagattctaaactcaaaagtccatcccttctcgttttaattgatactcctttgaaatagtctatataccccttaagatcaatctctttctttttgaaagctattgataatacttttgggaactttttcaacgttgaggaaggaaatgaaattcctacggcacctagtgttccaccaataactatcattgcagcagttggttgcagtaaagctataggttttcccccttcaataataaagcctactataatacaaataaatgcaaatagtacacttaaaattgtcataatatccataaaattatcccccttgaatatatgaaattttagcttatatgtagcatttttcataatggttaatatatatttatgtaaatttaatacagtatatgaatttatatacttatacaaaaataatagcatattataaaaaatatgtaaaataattatatatttagggggggagtttatatatgaccgctaattcatacaaattaatctaataaatttcaggtgttaagtaattgtaaagtctaagttattatattataatgttgaaagaatatgctaaataggaagggatattgatttatggagaaaaatgtttttatagttgatgaaaaagatagaggagaacgaatcgataagtatttagctgaaatttttgttgataaatcaagatcttttatccaaggacttattgaaaaggatggtattaaggttaataataaaactcctaagagtaattataaactaagagctcttgatgaaatagaagtaacatttagtgaacctgaagtattaagagtagaggccgaagaaatatctattaatatactttatgaagataaagatgtagtagttgttaataaaccacaggggatggttgtgcatcctgcgccaggaaactataatggaacattagttaatgctctgctttatcattgtaaagatttatctagcataaatggaattataaggccaggaatagttcacagaattgataaagatacatctggagttttggttgtagcaaaaaatgatgaagcccataataagctttcagagcaattaaaagatcactcaatgaagagagaatattatgccttggttgaaggaagactaaagaatgataaaggtataattgataaacctttggctagaaataagagagatagattaaagataggaattgtagagggaggcaaaagagctgtaacacattatgaagttttagaaagattcaatggctacacattgataaaatgtatattagaaactggaagaacacatcagataagagttcatatggcatctatcggatttccgctagttggtgatcctctttatggatttaagaaacaaagattcaaattgaaaggtcaaatgttacatgctaagacattaggttttgttcatccaagcaaaaatgaatatatggagttcacaacagaattgccagaatactttcaagaaataatagaaaaattaagaaatgaattaggataaaatagtggaggaataacatgaaattaaaatcagttttattagatgaaaaagctgttaatagaacattaataagaatttctcatgaaataattgaaagaaataaaggaatagatgaactagttttacttggaattaagactagagggtatccgcttgcaaaaagaattgctagctatataaagggaatagaaggggtagatgttccagttggatctgtagatataacattatacagagatgatttaactaagataagtgaagatttagagattaagaatttagatttaggtcttgaaataaaagataaaaagataattataattgatgatgttttatatacatgtaggacagcaagagcagctatagatgcaattatggatgtaaatagacctagaggtattcaattagcggttcttatagacagagggcataaagaactaccaattagagcagattatgtgggtaaaaacattccaacttctaaaaatgaggttatagcagtatctctaaaagaaattgatggagaagattcagtgaaaatatttgataaatagataaaaagggagaatgcaaaaatatgtatgagttaattgcaacaagtactttcggaatagaaagcataactgcgaaagaattgagggcacttggttatgaagatttgaaaattgaaaacggaagagtaactttcgagggagatgaaatggatatagcaatttgcaatattcatttaagaactgcggatagggtacttataaaaatggcagaatttgaagctaaatccttcgaagaactttttcaagggactaaaaaagtagaatggagtaagataattcctgaagacggagttatgcatgttgttggcaaaagtattaaatcaacgcttcatagtgttcctgactgtcaatctatagttaaaaaagctgttgttaaaagtatgagtgaaagctatggcatagagacatttagcgaaagtggaccagtttataaaatagaggtggctatcttaaaagatatagttacgcttactatagatacaacaggaccaggattacataaaaggggttatagagaacttgctggagcagcaccattaaaagaaactttagcagcttcaatgcttctaatctcaagatggaatgatgagtttgaattaatagatccattttgtggctcgggcacaatattaattgaagccgctatgatagctcaaaatattgcaccaggagtaaacagaagttttgtatgtgaaacatggccttcaattactaaagatacatttgattcagtaagagaaggtgcaaagagatctgaaaagaataaggatataagactaataggatatgatatagactatagagttctcaaagttgctatggaaaatgcaaagaaagcaggagttgataaatatatacaatttcaaaaaagagattttatggaattttcgacttctagaaagtatggattcgtagtttcaaatccaccatatggagagagaatcggtgagaaggaaatattacctactctatataaacatatgggaaatacaaagaaaaagctggaagattgggattttaatatattaacatcttttgagccatttgaaaaaacatttggattaaaatcaacaaagaatagaaaattatacaatggaaaaataaaatgttattattatcaatattttgacaataataaaattaaaaatgctggtgatatattaataaatgaattaataaagtaaagtttaaggcatcagaaagctttgaaaacatatttacaaagttttcttaaagtgataaaataaatttaaataaaatttgatggcaaaggcgctaacaatcagtcggaattgttagcgtctttttttgttaaagagtttctgcatatgataattgaaataaaaatatataagatatacaagtttcaataacaaatttaaatttgaaaatttaataatccaaatctttaattagaaataaaatgtagagaatcaattgtgatatgtatgtcagaaattaataatttcagaaataatattgtaaagaatttgaaactagtagtcagatagatactcttaaattgtcaaaagaaaggagtttaaactatgtcagaggtatatcaaaaaatggcagaaaaaataccgaatatgagcaaagcacaagaaaaaatagcaaaatatatattagcacacccaaatagtacgccttttctaactgttgaaaagttagctaaattatcaggagtaagcatagcaactgtcacgaggtttgtgatttttttgggatacaaaggttatcctgaatttttaaaagatactcaagaatccatgcaacagcaagtgtctaaaaccaagcgtataaggatcgattctgattctggtgatagtgaagaaagagatatttacaacatatttgaagatgacgtaaataatattaaactgacaatggaggacttaaatatatatgaattaagaagatctgttaatctgctattaaatgcaaaaagaatatatatagtagcaagaagaagctcatctgtacttggaatgtttttaaaatattatctagatttaatgtttaacaacgtaaatttaattgagcatatagagcaaatcccaaagcagattagtggagtcaataatgaagatgtaattatagggattacctttgagaaatatgcaagaagtacagtagaaatttttacacatctaaaaagaatgggagctacaacgatatcaataactgacagtatgttgtctccgcttgttccatattccgatataacattaacagctataagcaagggaacaaggtttatagaatcttttgctgcaccattgagcttgattaatgctttgattgcatctattgaaaaagaaaagaaagactttttcaatagtaatgtagaattgctagaggaagcgtgtagaaaatttgatttgttcatttaaatctaaaaatattatatgtttactaaaaagagatatatcctaggattaagatatatctctttttcagtaaattatgcattaaatattttattaaagtcagcagggtttaccattagagttttattagtatggtaaattaccattccaggttttgccccattaggcttttttaattctttaactttcgtgtaatcaataggtagttttagtgaatcttttcctttgctataataagctgcgattatagctgcttcctcaagagttttgtctggtacatcaaaagagcaaactataacatgagacccaggaatatcttttgcatggagccacagatagtttttatttgcaaattttaaacttaggtaatcattttgaagattgtttttaccaacataaatatcaattccatcacttgaaacaaagtgattaggtttagaagtctttattttttttgaattcttgctattttttctaaatcttatatatccagtttcaataagttcattttttatttcatcaatttcagtatagctttcagcatttagaatattagtaagtacagaatttaaatattccatttcttcatcatttttcttgagttgaactttagcgtattcctcagatgtctttaatttattatattttttataataatactgaacattttcagcaggtgttttggtcttgtttaaagagatagtaatgtattcttcttgactttcgttataaaaatttagtaaagtgcattcgctatcacctttttttatactataaatatatgaagttaaaagatcccctttaattttaaaagattctttttcagcgcactcattaagagtttcattaagtatttttaatttcttattacatctatcaatatttgtatgaataagtttttgcaaatcagtagatttattttgtaatctatcttgtttatctttcttctcataaaaggcatccattaatacattaggattatcatatgaaattgatagataatcttcatttagtgaatttaattttagggaataaaaatcttttacaattcccaatttatttgtatacatattgtaagagatgttttgatttaaattacaaatgaatttattaaaattttcataaatttcacttattgtaggtgaattattatgatttgtaatgttataatataaatcattagacaatagattacttattcctgtgaaacaattaaaataaaatttattatcaaaaacaatagaatttttgtttacaaaagaagataattcttctaaggtagtagaaaaaggatttaatttagtagaagatggaggataaataaaattgacaccaggatacaatactctataactatttatatcagcagttatatgttttattgattccataactttattgtctctatttctaacaagtgtgatattagagtgtcgtcccataatttcgactataagagaatataaactatcaaatcctagttcgtctctattttcaatttctattattaaaattctatcgttatctttttgagtaagatttgtaattctaccacctagtatgtattttctaagaaccattaaatacataggagctttaataggattctccttcgtgctatttgttaaatgtattctggcaaacctaggggatgctgaaatcaaaagtttgatattctgacgatcttttcttagagtcagaataatttcatctttttcaggttgatttattttatctattttggaatttaatattgatttttctaaattatttactaaactatataggtagataccatctaatgccattttatgtcatcctttcttagtgtaactataaatagtataacattataggcatataattatcaattaatagcaaaagtgagaagaagggtgaatcgaatgtatacatagatgttatattaatgtattaaaatttagttttaacactgtaatcctaattgggtttttgggttgctaaaataccaaatgcaaactgatattaaaaaatatatattataaatggaaaactagaataatagaatgaaaaagagttaaatattataaaaaaatttaaaaaaagtatatagaaaaatttttaaataagttataatttaaacttggtgatattattaatgattaaatacaaaagtttaatattaaatagttgacgcttatgaaattatacaattattaattataagaaatacagttattcaatagggggaatttaaatgaacttttataaaatgcaaggggcaggaaatgatttcgtatttattgaggatttcaataatgagattaaagatgaatgtttattagcaaaaaaactttgtgacagacattttggcattggtgctgatggtcttgttattgttagaaaatcagagatagctcatgctaaaatggttataataaatgccgacggttcaagagctaatatgtgtggaaatgctataagatgttttggaaaatatgtttatgaacataaaatagctacaggggataaattttcagttgaaactggtgatggaattaaagaaattgaaataatattagaaaatgaaaatgttaagtatgtaagagtttatatggggaatccatcttataacggatgcgatatacctttaaataatttggaaagtcttatagaaaaagaaattgctgtagatgataaaaagtataagatgactactttactacttggagttcctcatacaataattttcgaaagtgatagagaatacaatgttattcaagagggatcaaagatagaaaaattagatatattcggtgaaggaagcaacgtaaattttgtgaaaatagtggatgatacccatataacagttaatacatgggagagaggtgctggagctacattagcttgtggaacaggatgcagtgcttcagtagtagttgctaaggatttgggatttgttaataaagataaagaaatttttgttaaagctcctggaggagagttgataatagaagttttaggtaaagatgtttatatgaaaggccctgcagaagtggttttcaagggtgaactttctttataaaattataaaaaacgaggaaataaaaaatgaattcattagtaagaaagtgcttaagcatttttgctttcattgcaattccactgtttgtcttaggatgtgcatctaaaaaagaagatgcgcctaatgtgacagaggatatcaagttaaatataggagctgttctaaaaagcgaagacggtaattataaactatataattatgataatggtaagtatgtggagacaaaggaaaataaggttatcatagattatgataaaagtagttctaattatgtatatgtagataatggtaaaaattatgtagttaatagcggacatagatatgaaatccaagatgaaaattatagtggattaaaattatcaaaaggtggaaattatatttcttactttatagatgataatgggcttaagttgaaaatattcaatacaaatggaaataaagaaattgaaatgaaatctaatgtttcaatatcaggaacattatatgactggtatgatacagatacattggtttattatggagtaagcaatgatggcgttaatggattatttacttataatataaaagaaaataaagaagagttgctttataagattaatgaaggctatttagcatttataaaatcaagagatgacgatgtagtatttctacaattaacactggaaaataaaagagaagtaatgatgataaataaaaagacaaaagatgttaagcttttgacagataacatagaagagatttcagatataattataaataaagataagctgtattttacaggaaaagcgtataataatattaattctttatatgaattaacagataacaaggtaaaaagattagtatttgattttccgggtactgtaaaaatagaaaaaggattagaggtaagtgaaaatggagatgttttatttataggttctagtaatggagatctcaagaaagagcaaatttatacatacactcaagatggcagcataagtgaaatagggaatagttcatcagaatatgtttttttagcatatacgcagtaatttaaatttagaattctttatcatgtttttatatgatggaggattctttattaatataaaaaagtattgactcttaccttacgtaggagtgtatgctattcttatcataaaaataataatatacatattgcaaaaataattcttcatcataattctaaaaatattaaaagaattttagctgtagttgtgaattatgaaatatgcattgtgaattgcaacatatatattaaaaaaggagatagtagaatggatctaaaattacaatataactgtagtaatatagattgggaagaggtatctagtatactagaaaaagtagggatgagtcattatgaaggtgaaatacataagaaagcatttgaaaatagttatgctgctgtatttgcttttgataatgataagttgattggctttggacgagcaatctctgatggagtttatcaatctgcaatttatgatgtagctgtgctacctgaatatcaaggtaagagtataggaagtaagattattaataaaatcttagaatgcgttcctacatgtaatgctatattatatgcttcacctggaaaagaaaaattttatgagaagttaaattttagaaggatgaaaacgggaatggctttttttagaaattccattaaaatgcaaatgaaaggttttatagaatagtaaaagaataagtaagagttaatggataaactaaagctttaaagataataatatctttagaatttaaaattgtgatataggagcgtagattaatgaataaatttgataaagctattaacaaaaagactagtgaactaataacaaagaacttacttgggcaagaagttaatggagaagagttcagaaaatttaagattattgctagagcaattgttagagaagaaatgaggggagttaagccaaataaaaatcctaaatcattgtacggtaaaacctggaaagctgcaagaaaatataatgatgttaagaaatgaaaagtatagtattagcatttaactcgttaagttatcataaaatcctaggcatttattaatgtctaggatttttaatttaagcatttagtggtctctctcattttgataatgaaaaaaaatacattattttgaattgtgtgaataattactgagattttggttcaaaatttaaaatagaaactaaaaaatataaaatcagataggtgtgtttaaaattaaggaatatgaaattgaagatgtagatttaggaactgctaaaaatttaaaaaaagaaatttgtgagaagtatagagttattccaataaaagaaaaattggacgaggtaatagttttgtcgtatggagtaactgaagaagcaaaagaatatctaagatttatatataacaaaaacatagttatcaaagaaatcgaagagagaaattacgaaagcttaaaaaatataatatttggtatagatgataaatcattagatgagatattgataactaatgcaataaaggttaatgctagcgacattcatatagaacctcaaaatggttgtgtttatgtacgatatagaattaacggtagtttagttttggtgcacaaaatagattctgatgaatatataactcttgcatcgaagattaagctcaaagctaatatggacataactgaaaaaagaagacctcaagatggaaaaataatagttaattataataatctaaaatacgatttaagagtatcttcaatacctgtagtgtatggagaaaaattagtaattagaatattatattgtgataactttgactataatcttgaggatttaggattctcagaaagtcaaattaaactgattagaaaaataatatctttgaagaacggacttatattaataagtggcccaaccggttctggcaaaactactacaatctatacaatattgaaagaaatcgattccaaagctttaaatataacgacgttggaagatccagttgaaatagttatgcctaatatcaaccaaatgagtctaaataaaaaattggacatagatttctcaaatggtcttagaagcatattgagacaggacccagatgtgattatgattggagagattagagatgaagagacagctagcatggcggtaagggcatcgattactgggcataaagtatatagcactatccactgtaaatcagcaagggaagtttatataagattagagaatatggggattaaaccatatctattaagtgatgcgctagttggaataatatcacaaagattagttaaggttttatgtgataattgtaagaagatagatgatgaaaattcagtgaacggaaggatgttatataaaaaatgtggttgcaaaatgtgtaattattcagggtatgcaggaagacaaataatcagttcagttcacttcttgcaggacaatagtgaaaaaaggatgatggatttatataaggatagcaaatacctatcaaatgaaaatatgaagaaggatttggaagaactattacttcgaggaaagatatctaatagtgattatatagaatttatagaaggggaaagattgaatgaatagcaataattcggaaagttcgacttataggggattcaaaaatataacacattttagctttaaaaaagatatgaggattaagcataaaacagatgaaaaacagttggcgctaatatcaggaagtttggcacagatttataaggatggaataagaataactgaagcattagatttagtagctgatatattatcaagtaagatctataaggatagtttatatggagttttagatctgataaaacaaggtagtagtttgtcgcaaggattttcagagtttaaagacttatatccagaatttttcataggaataatttcaattggcgagaatactggaaaactatatgaagtgctgaagggattaagtgtatattatgataaatcgctatttattaagaaagaaatcaaaaatgcatgtatttatccgatgtttgtatttatttcaatgatattactcagtatatttttggtaaacgaagtgattccaaactttttcgaaatctataaatctatgaatatcaaattaccaaaagggtgccaagttatatatgatatgagtattgcttttaaggacaatcatctggttactggtgtggcaattttttcttggggcttaatactaataattcttataaaatgtttatctaatcaaattagcataaacaaactaacgaagataagtatcgtaagatcattttttgagtatataatggtattgcttttttctataataacaagtactggaataaacatttcacaggctcttaaatattgtgaaaatagtatgagttttatgtatttacgaaataaaattactgaaataaattcaagtattatcagcggggaaactttaactgaatctttagagaaaagtggagttttttcaaaatatgcgttagctattgtaaggattagagaggaaggggggacaatagaagaaggttttaaagaattagccaatactctagaatatagacttaatgagaaaatacaaaaatatttaaaaatgataaacccgattttcataattatgatggcaagtttcataactctatttttactgatatttgtccttccgttgtttaataatcttcaaggtggaataagaaaatgagaagcggtggattcactttaatagaaactatggtaagcatttttataataacaattttacttagtgtaggagtatcattaagtaaatttgctcgaaatatatcaaaaaatatggacaattcagaatatatttatgagattcaaaatttactttcatatggcaaagcggtttgtagagaaaagaataactatggaaaaataactgtaaaggcaagtaaaaatgaaattaaatttatagatggatgggatagtatagagaagactgtatgtattccgaaagaaataaaaatcattagtggagacataaatatattggtaacgccagatgggaaaatatctaggggaaatacaataaagataatagataattgcggcgtaaagcaggatataacgataggcgttggagtggatttgattagtataaagaatggtgaagcaatatgaaaaagcagggcagtatattaattgaaacattagcatctgcaatgattttaactttaactgttacatttattataagtactagcatagaaaattctaatacactaaaggaaagaattttacaagaagaagtcgatagagcaataagtaatttggaaaatgaattgaaatacaatacatcaaatgaagaaatacatgaaatgttagaaaataaaattggatttaaatataatggtgatcttagtagagaattaatatataaaaatctagatgaattagaagatggtgaggacattaagttagataaaataagtgaggatgatgttggcttaaatttagaaatagtagctaacattaaagttggaaaaaatgaagtaaatgtggaaaaaaagtttactaaaagttggtggatggatgaagtataaaataggagatatttttaaaaagaagagaggatttactattattgaatcattagcatatatttttttaacaacaatgattttagcatctggaataagtttgtttacatccatgtatagagcgtatttagaatcaattcagttaagtataaagtataataactatcaaaatttttttatagatttagataatattataagtgaaggtggaattaagcagataacagttaataataaccaaattaaatttttaaagaatgatgaatttaatagcatggataaaataattaaatcttatgacggaaaagtttttataaaatatacaagaaataatgttacacaaacaataaatactatgcttgaagatatagacaatcttgaaattaaggggaaaggaaaattaatttattttatactacatgacaaagatgggagggaatttattaagtgcatttgaagaaaaaaggaactgtattaataagtactatgatagtattatctttaatgagcattctagggtgttttatgtttaaaatgatgaaaaacaacaatgaactaagctgtttatacaattttgataaagataggtatgatttgaattcaaatgaggaacaagtgttaaataagtttatgatagagattaataaagagaaagtaaatagtgagaaactgaatgaagatatgttttcagaaaactttaataaaaaaatagatgataatataatcgaatacaataaagataataataaacttctattaacaacttacaaagaagatagtgtaacaagaaaaagaacaattatttacagttttaagggggaaaaaataattttaattccaacatataattttgatgactataacaaatagcatctatgataatgtgaacaattatgaaagcatttagactaagagtttataaaagaggtatttaatgagaaaatcaataatatttattaaaaaaaattattgcacatatgatgggaaaaattatgattttaatgaatttagagaattaaatggtttattaacttcaaatataaaggtggtaatacttcaagaagaattatttgtgagccattttgagaatgctgtaagaagatgtaaattatgcagatttgtagattcaaaaatcagaaatgatttccctcaaaatggagatatactatatgattttgagaaaaagggaaatgtaatttcaatatactccataaaagggtgtaagagagttgaaaaaatagttgagaaggcaataaatatagaaattaagccaatccagtttataataaaagatgttttaatgaaaatagttagagataataatagaaattttaaagcactaataaaatatgatacatgctattactatgtatcatttagggatagattatatcatgatggatttgtttctgaaaataaacatattgttgaagaaaaccttttgaagaagggtgatttcgaagaaatatacgttgatgacgatacggttgatattatttcagacaataataaatataaagctaaaaaagtgaatataggagaatttataaatgaaaatatatatgaaaaacaaagatttcattccagaaatattttttaacagggttgaaatgaacacaatgagaaaggagaataaagtggtaatattatttttaattattaacctaatcgcttttccgtttgtagttaaaaatataagtgaaactaaagaaagttctaaattaaatagaaatagtaatctagaagaaagtaagattaaatttgaagatattagcatttgggtaaagaatctaatgaaagacaatattgaagaggcacacataacaaataatggcggcgatataatagtaaataatttaagtgatatagatgagttaagttcaaatggttttatagaaatacatgatataaatttaaatgataatgaaaaatataaactgggagtaagcttatatgaatagattacttaagcatataattttaagcataatgataatattagcctttacgcaaatattatgtataaataatataaaaaaagctaataatatcaaagtatacaatcagcaaaataaattttacgatcataaaactttaaaacaaattaacagagagttagattgcttaaatgaaaagaatattctttctgctaatgaaaaagacggtaaatggcatgtgaaaataaaaatatccggtagtaaagatgatctattaagtgagctgactaaattaaaaaattatgatgtgaataactatagtatagataaaaataagaacgaaacctctattatattagatataagcactaaggaaagtgtttaaaaggttataaaattataaaattttactggaaaataatcagaaagattgcaattatcattgtcttttgataaaatatgagtgttatgtcaacgattaagtatattagcttaatatttgaaaaaaagttacgcggtaattaggcatattaaaaaaaataacaagtcattatgatagtctgttttgtataatacaaaagtaatatatttaatgaataatatattactttgatgtaatgttctttatttagtaacaaaaagaatacagaacatcttagaggtgttatttattatatgtcttattttataaatttggagggatctttaatgataacagcaggagatataagaaaaggaacaacgtttgaattggatggacaagtatttacagtagtagaatttttacatgttaagccaggtaaaggagcagcattcgtaagaactaaacttagaaatgtaatttcaggtggagttacagatacaacattcaacccgactacaaaattacaagaagcagtaattgaaagaaaagaaatgcaatatctttattcagatggagaattatattacttcatggatcaagaaacatatgagcaaattcctttaaactatgaaaaagttgaagatgcaataagatttttaaaagaaaatatgtttgcaacaataaaattctttaaaggtgatgcattctcagtagaagctccaaactttgttgaattattaataacacaatctgaaccaggcgttaaaggaaacactgctactaatgcaatgaaaccagctacacttgaaacaggtgcgatagttaatgttcctatgtttgttaatgaaggtgatgttataagagtagacactagaactggcgaatacatggaaagagtttaagctatatagttgctaagcgagaagcttagcaactttattttattgtctaggaaagtatagaattttttgattttgaaagtcagtgataccaatggttataaggatattggcttgtaaaaagtggtatcaagaaagagcgtggcgcagccactttgttctatttaatcgcaacatttttacaaataaagagaaggaagtgaaaagagatggaagagcttagcaaagagattgaagctttaaaaaagaatttatctaaaatagaaagtaaggaatataaagaatgttttgataatgtatactctattttagaagttatgaatcaaagaatagaagagttgactgtaaatcaagaaacattggaagaaaatattagatttatggatgatgatttatcaaatattcaagatgaactatttgaagagatgtctatagatgaattaaatgatatggaagatgaatatacggaaataaactgtattcattgtaataaaccaatttttattgaacaatccaccctaagcaataacgaagaaattccatgtccttattgtaaaaagaatataaaaggataattaattattaaatatataaataaaatggctatcttaaagttaaatttaaggtagccattttttaatttacatatttttattataattcagtaatatttttgggagatattaaatattaattaattaagagaacgatggaggaggcagtggagttttgattggtgaagaagagatagtgggaatttttccaactaaaataggtaatttacttaaggatagaattaataaagaacaggtatatgagcttaggattaaaattgggaaaccaattttggtttactcaaaatatggagaaagtattattaattatatttctacaaaggaagatatgaaaagtattatgcaaaaagtttccaattattcattatatgcctatgaagaagatataaggcaaggatttataacaattaaaggtggacataggatcggcatagctggtgaatgtgtaatggaaaagggtgaagtaaagactatacgaaatatttcatctgtaaatataagaatttgcagagaagtaattggatgttcaaataaggttatgaaatatattacatcagcatataaagtttataatactataataatttctccacctaaatgtggaaagacaacaattttacgagacatagctagaaatatatcaagtggaatgccatctttggggattgctggtaagaaggtggcggtgatagatgaacgaagtgaaataggagcctgctattttggaattcctcaaagcgatttaggaatcagaacagatgtattagataactgtttaaaaagagaagggttaatcatggcaattagaagtctttctccggaagtactaatttgcgatgaaataggcactaagggagatatagaagcacttattatggcgttcaattctggcgtaaatataataacaacaatccatggttttacaatagaagatctatataagagaagggttcttagtgacttattagataatgagattttggagagagtaataatattaagtaatagaaatggcattggaacagttgaaaatgtgtatagcataaaaggaggtgagagtatgtgcttaaattaattcttatagtatgcatatttattataagcacatatataggatttgcatatggagaaactttcaagaaaaggcaggagcagcttaaagagatattaaaatctttaacaattctccaaaatgatatagtttatggaacaactcctttgcctgaagctttaggaaatttatcacataaagtgtgcaagcctctgagcaaatttattgaatccgtggttaacaggttggtaaaaggaaatgtagaaagtgtatatgaagcagcattagaggagtttcaagtgttagaaaatgaattttatcttgaacgtgatgacagaaagataatgtcagacttttttaagtctcttggagaatcaggtgtttatggacaagaaaaaatattcttattagcgattgaaggaataaaaataaatctaagtgatgcagaggaaaatgcaaagaagaatacaaagctttatagatatcttggagtatgtttgggagcaatgataatcatatttatgatatgaggtcattataaataatttataatagctaaaataattatactaaataaggattggaggaagataaatgcatgatataactatactttttaaaattggaggagctgggatacttttagtagtattagataaggttcttactagcagtggaaaaggtgagattgcagctataacaaatattgcaggagttgtaataattctgcttatgatagtttcgatcataggagatttatttagtactgttaaaactatgtttgtaatgtaggtatgcagattatgttaatagtaaaaattgtaggcatagcgtttataacattatttattatgctattattcaagcaatctaaaaatgaattaaatacattccttgttctaactgcgggtgcattaattcttcttattatgatagagccacttagacaagtgatagactttgtaaaagaaattgcagataaagccaatattgatatggtctatatcggaatagtacttaagattttggctatagcatatatagcatcattttcaagtgcattatgtaaggatgctaatgccgatagtcttgcaactcaaatagatttatcaggtaaaataatgattttagtactagcaattccgatacttatggcagtattaaattctatattgcagataatgtaggtgtttatatatgaagatgataaaaagagttacgtttatagtattaatgagccttatgattaacatatttatttcggctgtgccaggtgattcttttattgaatcgagaactatttatgcggcagaagtaaataataaagttgatattgaaacaggtaataacacaaacttttatgataagaataaaagtaaacaatcttctgaaaatgaagttaacatagatgaattagggggaagtgcgaaagaagaaattaattcgctatatgaatatataagcaaaatgaaaacagatgttgagctcatgaacaatttaaatccagttgaatatgtcaaaacttatataaaagaaggtaaagggaatctttcaattgatacacttctaaaagcagcattaagcataatatttaaagaagtgaaaagtgtactatctttagtaatatcaatagttacaatagcaataatatgttcactactaaaaaatctacaagatgcattttcaggtgaaagtatatcccaagtagcattttatgcatgctacgccttaataataatggtgttatcaaagagttttataatttcaatttcagttgctaaagatgtaataaataatatttcagattttatgagtgcgcttctccctattcttgtgactatgatttctcttgctggaggaatagcagcggctactacattagatcctatagtacttggtgcagttgtatttatacctaaagtttattccaatgtgataattccaatgatattaatgggatttgtattggaatttgcaaataatatatcagcagagcataaaataaataatttgtgtaagttgtttaagcagatcattatatggtttcaaggaatcatagtaacaatttttataggattattaacgattagagggattacatcaactacgattgatgcagtgacactaaagacggcaaaattcgctgtagacaactttattcctattgttggaaaagccttttcggatgcaattacttcagttgctggatattcacttataataaaaaatgctataagttcaataggattagttgtaattatcttaattcttctacatccacttattaagttggttcttattgagtttatatataagttatcagcagcattaatagaaccaataagcgattcgagaataactaagtcattggaggcagcgggaagttctatgatgcttataatatcatgtgtattaactgtaagctttatgttttttatattaataggtatcatggcatccactggtaggtttatagttggaggataaaataatatgtttatggaagctttaaaaaaatttgtaattactcttgtgactgttcttatatttatgagcgctgtagagatgattgctcctagtaagatgaagaaatatataaaatttgtattgggattaatattaataactattatattaaatccaatcttacaaattgtagaaggtggagaaaaaaactttacagatgtcattaataattatgaacaagcattttcaaaagatagagatacagctaattttgacagtataaatacattaagcaaaagtaatacagatgatgagagaaaaaaagcatttgtagctaactttaataaaaattgtgataacattttaaaaaataatttcaaagacatgaattttaagagcgaagttgattgtgatgtagattttactaaagtagctataaatataaagaaacttaggataggtgtaagtagtaataaaataaataaaataaaaaaaatagtaataagcaaaggtgcagatgaaaataacgaagggaaaaatgcagaatacagtgaaatagctgattttgcaagcaacgaattaaacattccaaaggagaaaatagaagtatatggattagaggagtaggaggtatatatatggataaagataaatttaaaaaagaatttagcaaaatactagagcagaaaaagatgaagagccttatagcagtttgcataatacttgcatttatcctgattgctatgaatgtattttcatctggcaacaataattttagcagcaataaactatcatctaccgcagctaaaacaaatgcagaaaatgtagatgatactaaaataaataatgaagcagatgaaaaaaattatgaagaaaaacaaaaaaatgatttaaaaaacatattaaagaaaatgaatggagttggtgatgttgaggtaatgatgtcttttgaaaatgggggagaaaaagttccggcatatgataagaataatcaaaagtcaactacagaggaaaatgataccgagggtggaaaaagagttacaaatcaagatacagatacgtcaaaaactgtaatgacaacatctgatgggaataatgaaccatttattttgaaaacatataagcctaaaattactgggataataatacttgcagaaggtgctgacaatagcaagataaaatatggaatagaacaagctgtgtcaaaactatataacttaagtttagataaggttaatgtatatagcatgaagaagtagcatataattttatagaaaaagaatgggaggaagaatattatgacaaagaaacaatgtgggattatatttacattattagcattaatattatgtgtaggaatgctagcagcaaaacttaataacggagggctaaacgatccaacagatttaagccaggttttatctactgatcaatcaaaaactgaacaagatacacaggctttaagtcaacaaaattatttttatgatgcgcgaagcgaaagagaccaacaggattcaactacaatacaaactttaaattcaataatttcagatgcaaatacatcaaaggaacaaaaggatcaagcaacaaaagagttaacacaaaaaacaatgacaaaagatagcgaaggaagaatagaattaagtatcaaaaataaaggttatgaggatgctttatgtatgttacaatcagataaagcaacagtaattgttaaatcacctaatgaacttcaagaaagtgaaactgtagctatacaagaaatagttcaagagatatcaaaaattaaagacgtaataatacaagtacaaaaatagtataaaaaccataatatatttgtaatgttaaattatatttgatataatgaacacaagattatcatgttttgttatcacaaaacctaggaggttaaagtaacatggaagatttagttagagaagaaaatatcggagtagttaaaatttctgatgaggtagtaagcgttattgcaggaattgctgctcaggagattgatggaatattagatgctcaaatgggtgttgcaaacaacttaacaaacatatttaaaggtaaaaagaacaccgctaaagcaagtaaagttactctagaagaagataaagcaattatagatatgaacgtatcagttgaatatggtaagaaaataatggaagttgtgcctcaggtgcaagataatgttaagaaaaccgtggaagctatgactggactatatgttgaagccgttaatatctatgttcagaatatttatatatcaaaaaaggaagaaagtgaatctaactagtttgattttcaccctctgaagctttcagagggtgtttctatgctgaaattaaccaaggtttaaaagaaagcaaaagtgtgtataatgataaatgtacataattaactatgatacatatttaggaggaatatatgaatagaaaattatcaagagaaaaggctatggagttactttttggaatgactttgagcaaagatacaatggaagatgcagtggaagcatttgtagagaattatgaaggggatataaaagagattgacttaacatatgtaaaacaagtgttaattggtgtaaacaataataaagaagcaattgacaaagttatacaagataatttacataactggaaaattgaaagaatatctaaagttaatttaagcattttaagaattgcaacatacgaattattatatgataaggaagtaccaagaggtgttgccataaacgaagctttagaaattacaagaagatattcagatgaaaaaagtgtatcgtttataaatggagtactagataagattaaacaggactaattttaatatactaatacatttgaaatacacatgatttataatttaattatgtttagaatatttgcaattaaaaatacttaaaatcatataaaataggattacaaattgaaagtgggtagaatgataaaatggggcaaattattaatggtaaagaagttgcattaaaagttaaagaagaaataaaaaattttgttaataatagaaaagaaaaaaatcttcaagttcctaaaattgcatcaatattagttggtaatgatggtggatctatttattatatgggcagtcaggagaaagtagctaattctcttggagttgagtttctaaaattaactttaccagaaacttgtaatgacgaagatgttatagcagaaatacataaattaaatgaagataataatattcatggaattattctacagttgccacttccgaataattttgatgaaaagaaaattattaaacaaatatctcctaataaggatattgattgtcttacatttgagagtcaaggaaaactatatatgggagagccaaaatttttaccttgtacacctaattcagtaattaccttaattaaaagtctaaatatagatattgtaggtaagaatgttgtagtccttggaagaagcaatatagttggaaagccagtagctcagcttttattgaatgaaaatgcaacagttacaatttgtcattcaaaaactaagaatctaagagaagtttgcaagaatgcagatattttagtagtagctataggaagaccaaaattcattgatgaaacatacgtaaatgaaaatgcgattgtaatagatgttggaacatcatcttttgagggtaaaataactggagatgtagattttgataaggtaatagataaatgtagatatttaactccagttccaggtggagttggctctttaacaactactttattaataaaaaatgcatgtgaggctttacaggaaaatgaatattaagactttaactgtttcagaggtcacaaattatataaaaagaatgttagacaatgactttatcttaagtaatctctctgtaaaaggggagatttctaatttgaagtatcatagtagtggtcatatttactttacacttaaagataatagtggcaggataaattgcgttatgtttaaaagtaatgcagtattattagattttccattagaagaaggaatggaagttattattaaaggtagggcatcaatataccctgcaactggaagcttccagctttattgtgatgagataagaaaagaaggcttaggcggtttattcattaaatttgagaaacttaaagaaaaattatctaaagaaggatattttgatgaagcatataaaaaggaattaccaaagtatcctcagagaataggaatagttacatcgccaacaggagcggcaataagagatattataaatgtttcaactagaagaagtagtcttgtggatgtagtcctatatccggcaaaagtacaaggtgcaggtgcctacaaggatatcatttctggaattagttattttaatagaaagaaatcagtagatataattatagtaggcagaggcggaggttcaatagaggaattatggaattttaatgaagaggagttagctaaggcgatttttaactctaaaataccaataatttcagcagtaggacacgagatagattttacgatttgtgattttgtagcagatgttagggcagcaacaccttctcaaggagctgagattgctgttccgcttagtgataatataaaagatagattactagatatttcaaagaatttagataagtatataagtgatagattagatacttgtagaaataatttatcaggagctcaaagaattttaaaggttcattctccgatggctaaaatatctaattcgtatttagaagtggatagattacaagataggttgaattttgcaatgagaacgaaaattaaaggagaaaagaacaaagtagaaaatttaaataatttgctttttgctcataatccaattaaggtaatctcaaaaggatatgctataataaaagataatcaaaataatattattacatcaaaagaacagctaaatgaagataaaaatatagaagttattcttaaagatgggaatatagaaggaaaattcataccatcaaaatgaggagtttgagatatggctaaaaaagaaagttatgaagaaatgttaactaaacttcaagatatattaagtaatttggaaacagatgacttgaatctagaggaatctatgaaatcttatgaagaaggtgttaaacttataaataagatttataagattttagattcctatgaagctaaaatttctataattaaagatgataaagaattggagtttagtgaagagtatggagataaataatttaaaaaaagatatcaatgaatatttagaaaattattttagtaaaaaaggaagttttaatagaattatatatgattcatgtagctatagtttgaatataggcggaaaaagaatacgaccaatattgctttcgctaacttactatatatacaaagaagattatagggaagttatgccaatggcagctgccatggaaatgattcatacatactcattaattcacgatgaccttccttgtatggataatgacgatttaagaagaggaaaacctacaaatcatattaaatttcaggaaaatatagcagttcttgcaggagatgctttattaaacgaagctatgataataatgatggattatgcgctaaaaagtgaaaacaatgctttaagagcggcacatgagatagcagttgcggcaggcgcagaaggtatgataggcggtcaagtagtagacattatttcagaaggaaagaagatatcacaagatgagttagaatatatgcatgctaaaaaaacaggtgcacttattagagcagcaatagtttcaggagcaattttagctgaagctcctgaagatgatttgagattattaagagaatatggtgaaaagctagggcttgtttttcaaataaaagatgatatattggatgttattggagatagtaatgtattaggtaaaaatatacatgcagatgaagaacataataaaacaaattttatatcggcttttggattagataagtgcaaagaattatgtgaaactttaactaaagaatgcatatctattcttaagagtttgagtgttaattcagattgtttagttgaacttacatatactcttttaaatagagaaaattaatagagggaatgattgttatgaacttactggataaattgaattttccagaagatttaaaaaagcttaatgaagaagattataaagttttaagtagtgagattagaaaatttttaatagatagtgtctctaaaactggtggccatttggcatctaatttaggagtcgttgaattaacattaagtttatttaaagcttttagctttgataaagataaaatagtatgggatgtaggacaccagagttatgtttacaaaattttgactggaagaaaagaaggatttaaaaagcttaggaaatatgatggaataagtggatttcctaagagaaatgaaagtaaatatgattattttgatacaggtcatagtagtacttcaatatcagcagcgcttggaattgcaagggcaagagatttaaagaaagaaaaatataatgttatctctgttataggtgatggtgcgctaacaggtggaatggcaatcgaggctctaaatgatgttggatttagaaaaacaaaattaatcattatattaaatgataaccagatgtcaatttcaacaaatgtcggaggattatcgcgatatttaaataaacttagaatagcaccagtatataataagttaaagactgatattcatgcatctctagataactcaaatctaggtaaaaatatagcaggaaaaatatctaaagttaaagatagcataaaacaattaatagttccatctatgttttttgaaaacatgggggtaaaatatattggaccaatcgatgggcatgatatcgatgcaatgacagaggtgtttataaaagcaaaagaaataaacgagccagtaataatacatattttaactcaaaaaggaaaaggttatgcgctagcagaagaaagcccaagtaagtaccatgcggtaggagcctttaatttagaaagtggtgaatcaaatgcatcgccaaagaatagctattcaaaggcattcggaaaggcactagtaaaccttggaacacaagatgaaaaaatagttgcaattacagcagctatgccggaaggtacaggacttaaatgtttttcacagaaatttagagacagattctttgatgtaggaatagcagaagaacatgcagttactcttgcagctgggatggcgagtaacggtttaaaacctgtttttgcagtttattcaacatttctacaaagagcatttgatcaagtaattcatgatgtttgtattcaaaaccttcctgtaatatttgcgatagatagagcaggaatagttggagaagacggtgaaactcatcaagggattaatgatttatcctatttatctatgatccccaatatacatatagttgtaccaaaatgtctagaagaagttgatgttttattaaagtgggcaattaacaaaaatgcgccagttgcaataagatatccaaagggtggaaacataattgatactctttcaccaattaaagaggtggtagaaggacaatgggaaatagtaaatagaggttctaaggtttgtattattgcaactggcaggatggttcaacatgcaatgcttgcaaaagaattcctatatgagaacggattaaatccaacggttattaatgcaacatttgttaagccaattgataaaaaattactagaaaatataaaaaaagaaggatataatattttaacaatagaggataacattttaaaaggtggattaggttcagctgtaagagattatttaagtgaaatagattataaaggaactattagatcacttggatatgatgatgaatttattcctcagggaaatgtagaaatcttgtataaaacatataaattagattacgagaatataagcaagattgttatgaagctttatgattaaaaggagaaacaaatggcggaaaaaaaagaaagacttgatttacttttagtagaaaagggcataattaattctagagaaaaagcaaaagcttgcataatggaaggtaaagtttatgttgatggtcaaaaagtagataaggctggggagaaagtaagttttaatgctaatattgaatatcgcggagaaacgcttaagtatgttagcagaggtggactcaaattagaaaaagcaatgaaaacttataacatatcattagaaaataaagtgtgtatggatataggggcatccacaggcggattcactgattgcatgcttcaaaatggtgcttctaaagtgttttctgtagatgttggctatggacagtttgcatggaaacttagaactgatgaaagagtagtttgcatggaaagaaccaatataagatatgttactctagaagatataggagaacctttagactttgcatctatagatgtatcttttatatcactaaaaaaaataatgcctgcaacaataaatttgctaaaagatgatggagaagttgttgcgcttataaagcctcaatttgaagctggacgcgagaaagtaggaaaaaagggtgttgtaagagagataagcacacataaggaagtagtccatgatattatagactttctattacagcaaaacttaaatgttttaggtgtgagcttttctcctattaaagggccagaaggaaatagagaatatttagtgtattttacaaaggataaaaataaaacgagtgattttggaaaagatgatatagatgaagttgttgaaaattcacacatagaaatttaacttccttggaggggctatgaataatattgggattgcaattaatccatcaaaagatgcagataataaaatattaaatatggttgtaaaaaagtttaaggaaaagtttaacttaaaaaacattgaagtttttaattcattcgatatagaggatcagaatttaagagatattgatttacttattgtattgggtggagatggtacactccttggaatagctagatctttaaacgatagttttaattcacctatcttggggattaatataggaaatttaggatttttgtcaagtgtagatatatcagatattgatattgctcttgaaaaattgaaagatggaaaatataaatttgttgacagaatgatgttaaattgtaaagttgaatcagatgagaataaagaagaacttaaggctttaaatgatgtggtactggctaggggaactctttcaagaatggtgaaatttacgatatttgtagatggaaaaatatattcgacattcaaaggtgatggacttattatagcaacacctactggatctacagcatattcattttcagcaggaggaccatttatatatccagatttagaacttataacaataactcctatatgtcctcataccaaaagtatgcaaactattgtattaaaaggagacagtgttatagagatatatgcagaccatgaagaagaaaaaatttatttgactgtagatggtcaaaaggctattaaaattaatcatgaaacttcggtaaaggtaagtaaaaataaaaaaagtgtaaaattacttgtatttgatgattatgattattttaaagtcttgagaagtaagattttgaataattctaaagaatgtgatggtgagaaactttgaaatcaaaaaggcatactaaaatattagaaatcataggctcaagagaaatagagacacaagaagagttggcagatgcattaaaaaaagaaggatttgatgtgacacaagctactgtatctagagatataaagaatttaaagttaataaaaatgcaatcgactaatggtaaatctaaatatgtcgtgtctacaggagaacaaaaaaacattattgatagattaagcaatattttagcgaatacagtactttcagtagaaaacgtagataaaatggttgtaataaaaactataacagggtcagcaccgattacagctgaagctattgataatttggaaagtgcggatattgcaggaacagtggcaggagacaatactattttcatcttagttagaagtttggaaagtgctgaagatttggttgataaaataagaaaaagaatgtcatcataaatattaagggtgggatgaaatgctaattcaattaaatatcaaaaattttgcgttgatagaagacatgacgataaattttagtgaagggtttaatatactttcaggagaaacaggagcagggaagtccataatgatagatgcaatcgactttgttcttggtggaaagttctcgaaaaatttaataagaactggtgaagatagaacatatgtagaggcattattttcattagaaaaatcaaaagtttctgaggttctggaagaattagatattgagtatgaagatgtgttaataatttcgagagaaagccatgcgagtggaaaaaacttgataaaggtaaatggaaaaagcttaattacttcacaacttagaaaaattagagcaaaacttttagatattcatggccaacatgctaatcaagaacttctacaaagaaatactcatatatcatatttagatggatttataggcgatgagatgataaatccaataggtagatttagtgatttaagggcagatttaataaaaataagagaagaaattaatagaatttgtggcaatcaagatagggaaaaattattagactatcttaaatttcaaattgaagacattgagaaagctaaattaaaaaaagatgaagaagaaacgttaaaagaagaatataatattttagcaaatgctgaaaaaattaataatagtttatctatatcatatggaatacttagtggaaacgaagagttaaatgtgattgattccatatcaaagataatgcatgaactatctaatgtagaaaatcattttgaaaagattaagaagaataaacaattaattgaagaagcattttatactttagaagaagctagtcgcgaaattcgtgatatggcagaagaaattgtttttgatcaagatgcgttggagaaagtaaatgctagaatttatgaaataaatacttacaagaagaaatatgcgccaacaattccggagatcttagattattatgaaaaaataaaaaaagaatataatgaaatattaaattccgagcaaataatagaaagtcttaaggaaaaagagaaagaaattctatctaaaatggaaaaagaagctttaattcttcatgaactgagagtaagaaaaagtaaattcttagaagaaaaaatattaagagaacttacgtttgttggtcttgaaaaatcaagaatggaaataagaatagttcgtcaagaagagtttaatgagaagggatttgatgaggttagttttttaatatctacaaacccaggagaaccgcttatgccacttgaaaaagtattatcaggtggagaactgtcaagaataatgctagctttaaaatgtgtttttgctgagaaggatgaaataccaacattaatttttgacgaaatagatacaggaataagtggagcagttgcacaaagagttggagaaaagatgtatcaattatcagatacacaccaagttttatgcataactcatttaccgcaaattgctgtattatctgatcatcattattttgttatgaaaaaagttaaagataacaaaacatttacaaggataaaaattttagaaaaagaagaaaaggaacttgagataagtaaaatgttggcaggagacgatgtaacagaggctacattaaataatgttaaggaaatgataaaattaagtgaactaaaaaagctagaaattaaaaaataaatacatatagaaaataaaattggtaaaaataaaaccatgtaattgcatggttttatttttttatttttataattttggaaatttatatataaagtaaaagaaataaagttatatacttttaaaatttagtataagctaaattttttgactacaataacaaagttcttataggataagacttgagtgcagtgggaaaattaaaattagtaagtaaaggaggagagaaatatgaagagaaaaattttatgtgctactagtttaattatgactccaatccttattctaattttatttaccacaatgagcataaggaaattaccaagtaagatttatacaagagatgaaaagacagtacaatcaattgcacctataggaaacaccataagtaagattggtaataacgataatgagtatgagataaaatttttgggaatgattcctctgaaagctgtcgaagtacaaaaaattaaagatttagaaatatatccaggcggaaatccagtcggagttagagtgaatagtgaaggcgtgattattgttgggtattctgaaattgaaatcaataataaaaaggaagaaagtcctggtaaggctgctggacttgaaattggcgatgtaatactaagagtaaatggtgaaaatatggagaattccatggatttattaaaaacaattaaagaatgtgataatgaaagtataaaggttgatattttaagaaatggtgagaatcttacaaaaacaatacatctaaaaaaagaaaataataaagattataaaataggattatggataagagactcaactgcaggagtgggaacaatgactttctttgatccaagtactaaaaagttcggagcattaggacatccgataacagatgcagatacaaatgaaccatttttagtaaagaaaggagacttattagagtcatctataataagtgttagaaaaggagaaaaaggatctccaggtgaattgaaaggaatttttttaaatgaagagacaccaactggaaatattgaaaaaaatactcaaagtggaatttttggtgaaatcaaaaatgctcaagcattcaataataaaattaaacctcttaaagttgggtttagagatgagatatctgtaggaaaagctaaaataattacaacagtagatgagaatggtccacaagaattcgacattgagattgaaaagactttaaatcaatctattccaggatcaaaaagcatggtaataaaaattactgatccaaagttgttacaaaaaacaggtggaattgttcaaggaatgagtggaagtcctataattcaaaatgataaaatagttggagctgtcactcacgtactaataaataaacctgatactggctatggtatttatatagagtggatgcttcaagaagcaggaataataaaataaaaacaaatgatgataggtagtgtatttaaaaatcgctacctatcatcatttatttttgttttgagtttaatataaaattatttgaatttatggaatataaaattaacaaaggaaaatatagtattgatttatggtgttatatcatataaaactacataattttaaaataattattaatatataatttcgatatagattgtagaaaaaggaatataattatataataaatatgtattcacttaataattgagaatttaggaaatatatagttacatttttacttaaaaaaatactttaaaagtattttgtcagaacctatttactttctgagaaaaaaagtgtataatttacaaatagtggaagatgataaagtaatattaatcggacttaagagatatttatgtaaaagggaatatattaatagaaaaattactattgtaaatgtagacgtacataccctattaatgtcaaaggatcttacaataatttgtagaagtaatatattgtgttatattgtacaataatggaactatttaataagatatggttataggggttaaataatatattaaaatacaaacataataaaagaatggacaaaaggagagaaaaaatatggaagattcaaaaatatctgtactaattgctgatgataacaaagaattttgcagtatattaaatgattatctacttaatcaaaaagatatagttgtcacaggaattgcaaaagatggtagagaggctttggagttaatagtagaaagaaagcctgatttagttattcttgatataataatgccacatttagatggattaggtgttttagaaaaattaaatacaatgcaattggaaaaggttccaagaataataatattatcagcagtaggtcaagataagattactcaacaggcaataactcttggtgcggattattatactgtaaaaccttttgacatggaagtattcacaaagagaatcagagaaatgtttaatagctctgctgcagttcaagaaacaaacatgagaaattcgtatgcatcatcaatgatatctactccaagtgaaaataaaacaaaggcacctattgatttagaaacagaaataactaatataatacatgaagttggagtaccagctcatattaaaggttacatgtatttaagagaagctataacaatggttgttaacgatatggaattattatcagcagtaactaaagagttatatccttcaatagctaagaagtacaatacaacagcttcaagagttgaaagagcaataagacatgcaatagaagtagcgtggggaagaggtcaaattgaggctattaacaggttatttggatatacagtgcataatgataaaggcaagccaacaaatagtgaatttatcgcgattatcgctgataaattaagacttaagaataaagtgtcttagtaagcattttattaatgtgaaaagctaagttgaatattgcaaaaaatggtttccatcatatttcaatagtaactaatagtttttcatataaattaataatataaatttatgtaagactaataccttttattagttgggtgtaacaatctaactagtaggaggttatttttatgcaaaaaataaaaacaaaagattatagaggaaagcaacctaaattaactatcccttttaagtagaaaatttgaagcggacatgttataattaaagtgttagaatttaagatatagaaagacagaggattaaagtgtatggaaataaaaattaatattccagtattaaaaatattagcgataactatttcgggaatattgggttatataactggaataatagtatataaatagatatgatattttagactaaggagatataaatattctttggtctttttttatgtaaaaaaataaatcaatatagtaagttattaacgacataaaaacctacacaatgttataaatttacaatgtatcgtgtataaaaaggagaaaaagatacttttagtgctgaaaaatgtggaaataaaagttaaaataaagatgaaagaaagaaggtatttgtataagaatgtagaaatatatgattaggttaaagagattcgatgtttataagtatatcgaatcaatttaactaaaattatattatggaggtattataaaaaagagaatcaacttaagaataatttatgcattaatgaagggtggttttttatggaatttaattgggataagaaatggtcagtaggtattgataaaatagatcatcaacacaaagaattatttgatagaattaataagttagtaattgcaatgagagagggaaaaggaaaagatgaggttatagagactttaagctttctagaagagtatgttattaagcattttaatgatgaagaagagatgcaaagaaagagcaattatcctaaatacgacattcaacataagcaacatgaagaattcaaagaggagcttagagaattaagaaaagtttttgaaaaagctggtgtctcagcattatttgttattaatgtacaacaaaagatgtccagttggtggagaaagcatattagagaattggatcgggatctaggaggattcttaatagaaagttctaaatagtactgtttactaaagatatgatggaatataattatattaaaagataaaaaatcttaatcgttttaatttggcaaattattaagaaaaatcaataaaaaggatagcttatttggaaatataagctatcctaaaattggtttatgatatttttttgaggtaaaaaaataatgaaaattgtttatgttaatattataacttaagattgttacagtattatgacaagactagtatataaattaattcttattgaattttaagtttaagaaaaaattgttttatattagaaaatatctataacacagttttataagtaaaaatcttatacagaataacataaatactgcagattagaaaaagggattttatataatttatagaatatttttagttatagaaaaggggtgagggtatgggagaaataaaagatgaaaagctaacaaaggatcaacaaaaagaagcattaaaaagcgccataacaacgatagtagaaaactacaagatgttgctaataagtaacaataatatatcaggcctagagaaacaaaaattatacggtgatcttgaacatagtgtggcagcaatagaatttataacgcaatgtaagcttgataaaggtgttttatgggaaggaatatgaaactaatctagataattaaaatagatatagtgctattaaagtataattagtgcagcataaaaaatattccacataacaaaaaagaatagttcactagggtgaaatgaactattcttatatgggtcatagtatttttaataggagtaaaataatgttttatcttgtttcaagtaatattataaatatatattgtggcaatattatgacaactataaaaaactaatattaaaattttagcaataatatttaaaaaatttgcatagaattgttgacaaaactcatgaatatatgatatttttgtaaaagcatacttttaatttagttcagagaagctaagaagggggaacatatgatgaataataaatcattaaaaagtgaaaaaaattttatagatgtaaaagagaaagtttctttaaagagagcaattccattaagtatccaacatttgtttgcaatgtttggagcttcagtcttagtaccacttatttttaaaattgatccgacaacagtgctattttttaatggtattggtacattactttatgcctttattactaaaaaaagtattccagcttatttaggatcaagttttgcctttatatcaccagtattacttttatatagtcaaggatatgattttcagactatacaaggcggttttgtatttgtaggtatatcattttcaataatagcgattattgttggctacacaggtatgggatggataaataaattatttccaccagctgccatgggatcaataataacaattataggtttagaattagctagtaatgcagcagatcaagcaggttttccggttggattaagtaattctccaactttaaacataacatgggtaattgtttctatggttactttagctacagtgattttatgtaatatcttattaaaaggattcttgaaagttatacctatattaataggagtggtagttggatacattacagcattctttatgggattagtagattttagtactataaataatgcaaattattttgttttacccaatataaaggttgcacatttcagtttaaatgcaattttaactatactacctgcaacattcgtagtaattgcagaacatgttggtcatttaaaagttactagcagcattgttggaagagatttatcaaaagatcctggacttcatagatctttacttggagacgggctatcaacaatcatttcgggaatgtttggttctgtaccaacaacaacttatggtgaaaatataggagttttagctctaactaaagtgtatagtgtatatgtaatatgtggggccggtttagtatcaattttgctagggttttctgggaaaatgtcagcacttattagcacaattccaacacctgttattggagggataagtttcttattatttggaactattgcaacttcaggattaagaacttttattgaagaaaaagttgatttttctaaatcaagaaatttaatattaacttcagtaatattcatagtaggattgagtggaataaaattaactttaggcactattgaacttaaaggaatgggactagcaacagtagttgctatggtgttaagcataagctttatgatatttgataaattaggtataatgaacgaagcagaataagataaaagtttatagataaataattataagaatgctgttagtattagtaaatactaatggcattttttattttaaagaaaagaagtataaaattaaagaaagtagatatatttagctatttatatttttatagttaatttatgaatatataagagtattaaaagagaaactatgtatgaagataaatgtataggaggaatacaaatgaaattaaaaaaatacataaaggtattaagttattttattatttttaacgtaattatgagttttgctttcattggcgctgatgttaatgctgtgaaaataactactgataaggagccattatatacagttgagtatgatggctatgatcttacagcaagaagaataagagttgctggaagcaataatattgcatattgtttggagataaacgaaaaatatccgtctggtcaaaatttttcgtcaaatagtaatctaagtgaatcaattcgtaatatcattgctgctggatatccaaatagatctgtggctgaattaaatctagataatgagaatgaggcatatttcgctactcagatagcaatatggagttcaatggaaggatacgatgtcaataaaataaaaggaaataactctaaaatagtagatgcaataaagagcatatataatgacggagtaaatggaaaatattcaagtaaaataagaagtaaagtatataaaacaagtgatgaatctatacaagaaattatagttgtatatactgatgatttagtatcggaagaaaaagcagaatcgattcaaacagaatatgcaccacaagaaggataaataaaattatacattacatgttaatgctgttacataataaatgttttatgattagtctaataaatttaccttgtaacagcattaatggttaattagaaggaaatcttggctattattgacaccaatcatctaaaatgataaccttttgttagattattagaagtagtaaggtggtgaagaagattgctgctaaaggattatagtaaggaacaaattaggaatttagttgaaattattaaagattgtgttcgtgaagacaggtataccatatctttagaagaaaataaggcggaaaatattcaatttatagaagaatacaatataaatgaaaagaagagaataagtatactatgcgatatagactacaaagatttttgttatggtcttcaaaacgtaaaaaatggagttgagcaaaatgatctttacgtattttgtttacaaaaagaattgtataatgttgaggataagagagaaatagtagatatttatttaaagtttaatgtaatatgcaatgaagtaaatagtagtagagtactagtgtctctacataaaagaaacaagcctattacatatctttttagataaaaagaattatcttcatttctaaaaggagggataaactcatgaaaaaatcagcattttgtgaatattgctttagtgaaagggaatatcaagtatataaagtaagaagaacatctatactaaaagaagaagaggtaagctacaaggctaaagaagctgtttgtaacgtttgtggtaatgagatttttgtgtcagacatatgtgattataatttgatgaatttatataaagaatatagaaggaattataatattattagtacagatgaaatacaaaaagttaaaataaagtattcaattaattcagaagcactttcactaatattaggatggaatagtaagactatagaacgatatttagatggggatatgattggagtctccaatagttatttattaagaaaagtatatgagaatgctagctattattctattatattgcaaaataataaggaaagaataaatccagtagattacaataaaagtagacaagctattagatatattttagctcaagatcagacagaagaaaaaatcgatgcagtaataaaatacttgttgataagatgtgaagatttcacagctttatcaatccaaaaacttctatattacgtacaagcatttcattatgtctttactggtaatttcatgtttgaagaagattgcgaagcttggaaggatggtccgttttatcgaagcctatatgaaaggtatgaacaatttggatatgaaaaagttaataaagatatacttgctaatgaccaattaaggttagagaattttgaacggaatattgtagaaagtataataaaatcttatggctgttatagtggaaaaatattaaaggagatgactaaaagcgaagctccttggatattaacaagaactaattctattaatggaaagagtatcaaatatggtaaatttaatactgtgattgaaaaaagtttgattcaagagtattttgatagtattaaggaaaaatataatattagtagtttattagatatacaaaattatagtagagatttatttgataagatatctatttaatataaatttaggaaagaggtaatttatgaaaactacattattacttattagacatggcgaaacagaatggaatgctttaggaaaatttcaagggtgtacagatatagagttgtcagaggaaggagtaaaacaagcgcaaatattaaaaaaaagacttaatggagaatttgattggatatatgctagtccgttaagtagagcttttaaaacagcaaatatattagcatcaactacgaataaagaagttataatagaacctgagataagagaaattaattttggagaatgggaaggattgactgttaagcaaattagtgaaaagtatcctgatgtttttaaagcttggagaactgataaaaaagaaagttatatttgcggtggagattctagtatccgcaatgcggtaagtagagctaagaagtgtattcaagaaatagtatctaaacataaaggtgagaagatagtaattgttgctcatggaggaataataaaagctggacttataggaatatttgactgggatatgacaatgtatcataaagtagcacttggcaatacttgtattaataaaataactttcaatgatgatttaatgccaatgttagttagtttaaatgatacaactcacttagattaaattacggaagttatatgaattaattaaaaaatgtaattctgtaaaatgtctcaaaatatattaaatgttaaacataaaataattactctaaataaatagataagatttattttaccaatgaagtttataaaattatcgtaaatatattttacgatgattcataaggagtaaaaaagaatgatatacatagtgataagtattatattgattttatattctggaataaattattacattagcatatggttttggaaaaatttatgtagtatgatccctttttttaatagtgaaatatactttagcttcttttttattatatttataataagcttagttggagttatatggaatcgccatctacctaaatttctccaggatggagtttacttgatggcatcgtattggcttgctgctatagtatactttgcaatatttattggcataattgagtgcttttttattttaggcaatactttacagcttatacctagcgatattaaacttaacgcaaatgctttattttatattgctttgatagttctttttactgtaataattataattctatacggagcggtaaatgctaaaaacgtaataattacaccatataatatagacttacctaaaaaggcaggaaagataagtaaattgcaaatagcacttttatcagatatccatcttggtaatttaatggataaaagaatagataaactaattgataaaattaattctatacaaccagatattgttttaattgcaggagatataattgattctaatagagatatgataaattatgatttttctaagatgcaatgtaattttcaaaaaataaaaagtacatatgggatttatgcatgtttggggaatcatgactatgatcataaaggtgattcatcaaatagaataaacaatttaaaaaaagtaggggtaaatatattacgagacagttatgtaaaaattgatgatagcttttgtgttataggacgtgaagatatctcttacgaaagaataaatggggtaagaagaaaaaatctatcagaaactgtaaatgaaattagtagagaattacctataatagtgcttgatcatcagcccaataacctaaacgaacctatgagtgaaggaattgatttacaattatctggtcacacacataaagggcagttttttccttttaatttaataacgaaaagagtatttaaaattgattatggatatctaaaaatggaaaaatttcaaataatagtttcatgcggcacaagaacttgggggccgcctataagaattgggagtaaatgtgagatagcaaatataaatgtaacatttcaataagagataatttttatttcttatagtgataaatagataaattatggataaataaaaaatgaacaaaatctaagcggaaaaaatgcaattaaatatacgtcctaaaaagatacaatgtaataaaaacggacaatttatttataaagtgtatttttttattacaataaatttgccttagaaaagctacattgttaataattagattataaaattttaataaatagagaaattagtatattaatatgtcttaaaaaattcatgtagatttatgaactagaaccttgtatttataggcagatatatccttatttgtattagtatgaaataaaaattatgcgataaattataccagaatattacatgaacttatatagtaaattgataaaataataacatttggcataaatattgctttacataattaatgtggttaaaagcaaataaatatgacagatgaattttaggaggtataaatttatggcacgttttactttacctagggacttatatcatggagaaggggcacttgaagtacttaaaactttaaaaggcaaaaaagcttttgtagttgttggtggaggatcaatgaaaagatttggttttcttaaacaagttgaagattatttaacagaagcaggaatggaagtagaactatttgaaggagtagaaccagatccatcagtagaaacagtaatgaagggtgccgaagcaatgagaaacttcgagcctgattggataattgctatgggtggaggatcaccaatagatgctgcaaaagctatgtggatattctatgaatacccagaatttacttttgaacaagcggttgttccatttagtttaccagagcttagacaaaaagctaaatttgtagctattccatcaacaagtggtacagctacagaagttacagcattttcagttataacaaattacacagaaaagattaagtatcctttagctgattttaacataactccagatatagcaatagttgatccagtattagctcaaactatgccaaaaacattaacagctcatactggaatggatgcactaactcatgctatagaagcatatactgcatcgcttagatcaaatttctctgatcctttagcaattaaagcattgcaaatggtacaagaaaatttaatcaagtcttttgaaggcgacaaggaagctagaaacttaatgcatgaagctcaatgtttagcaggaatggcattttctaatgcattacttggaatagttcattcaatggctcacaaggttggtgctgtattccatattcctcatggatgtgcgaatgctatattcttaccatatgtaattcaatataatagaataaaatgtgaagatagatatgctgatattgccagagcattaaaattagaaggaaatacagatgcagaattaactgattcattaattggaatgattaataaaatgaatgatgacttgagtattcctcattcaatgaaagaatatggggttacagaggacgattttaaagcaaatctttcattcattgcccataatgcagtgttagatgcgtgcacaggatcaaatcctagagaaatagatgatgctacaatggaaaaattatttgaatgcacatattatggaacaaaggttgaactataatacttagatgtatatatgtaagaacataagaatgaagtaatataattgtataaatcaatgttttttattttcatataaaaagctctctattgagggcttttttattatgaaaaaaattatagggaaataataatatttattgttatttttttgtttaaatgataaaattactttaatattaataaaaaaacaattactacgagatcaataaaggtcatatgatgtaattttatacaataatatagaagaatgtggttagctatttttactaaatgttttagtagtttatactaaagttacaaaaggccggttcaaactttacagttttaattggtctattattatatttgggtaggagtaaatattaaataattaaaagattaaacgattaaattaagttttcaatgcttaaagggggataaaatatgattaataatttaaaagttaaacagaagattttcttattttcgtggataatgattttattgattatctttatggggggagttggatattattataatttgcaatcaaattacaatgtaacatccatgtataaagatagattgcttccggtacagtggttaaatgataatagaaaccaatcaagagcaatagaagcagatacatataatattattttgaatataaaagatactgaagaacaaaataagaaattaaatgatattaaagatagagtaaaggcatacgataacaactggcaggcgtataaagaaactgagcttgaccaatatgaattagaaattataccattagttgagaacgatcttaaagaatatagagcagcaagagatgaaattataaaattagctatggatgggaagcaagaagaggctttagaaaggtataaatcaataacttggaaagtagatgaatttcaaaaaaacttaaaggctttggcgatatatagtactgataaagcacaagaaataaatattcaaaataacaatagttttagttattctagaaagatttttatgatgttaggttttttggcagtagtgatagcaactactttatcagttattatatctaaaacaattgctaacccattgaaattatcagtagagtgcattagagttttagctaagagagattttacagtatcggttcctgaacttcttttaaagcgaaaagatgaaatgggagatctagctaattcaatatttttaatgaaaaatgatattagcattttagtaaaggagataatggaaagatcacaagatatgaatgcttctagccaggaactttctgctactgtcgaggaattaacaacaactgtagggagcatagacgcatcaattagaaatatatcaaatgatatacaagaaacaagtgcatcatcagaagaaataagtgcatctattcaggaagtggattctaatattaatttactatcaggtaaagcaatggaaggaagcaataatgcaagtaaatccaaagaaagagctacagaagtgcaaggtcaaggtaaagtgtcattagaggaagcaagaagattatatgaagaaaagagagaaaaaggggttaaagcaattgaatctgggaaggttgtagaagatataaaagcgatggcagatactatagctgatatatcagagcaaacaaacttacttgctcttaatgctgcaattgaagcagcaagagcaggagatcatggaaaaggttttgcagtagtagcagaagaagttaggaagttagcggaagaggcatctcaggccgttaccgttataaaagatacaatagtaaaagtacaagctgcgtttaaaaatctttctgataataacgtagaagtattagagtttataaaagaagatgtaaattctaaatttgaggatatgaagaatatggggaatcaatattatgatgatgcagaatttgtagcaaatatgtcagaggaaatagcttccatgtcagaggaacttacagcaacaattcatgaaataactaatgcagtacaaaatacagctgaaattgcacagaaatcatctgaaaacgctgaaacaataaaagatagtgtaagcgaaacaacaattgagatagagcagctagcgaaagctgcgcaacagcaggctctgctagcagaaaagttaaatgaagtggtgaacaaatttaagatataagaaattatatataaatagatctatttaaaattatagtatttaaagaaaaaagatagcattttcaagatgaggtgctatcttttttggggtgaattatttttcatttaacgagaaatcttcctcgcctaaatatattggtataagtttatatgtaaatctctaatgataatgtttatttaaaatgtatataatttgtgattggaatgtaacaaaactgtgacaattattttctagaatgtaaatatagatttaaaagagtttataactcaacatttaatttatgaaagatatttgaggtgataaatatgaatgataaaacagtttattctgttatagtacctttatataatgaggaacttgttataaatcaaagttataaaagactcaaagaggttatggattctacaaatgaaagttacgaaattgtatttgtgaatgatggaagtaaagatagaacaagagaaatagcagaagaaatatgtagcagagatgagaatataaaactcattaatttttcaagaaattttggtcaccaagctgctataactgcaggtatggatctagcattaggagatgcaattattgtaatagatgctgatctccaagatccaccagaagtaatgcttagaatgattgaaaaatggaaagaaggctatgaagttgtctatggaaagagattaaagagagaaggggaaacattttttaagaaatttacggcaagagtttattatagattattaagaagtatgacaacagttgacgttccagtagatgcaggagatttcagacttatagataggaaggtgtgtaatacactaatagctttgcctgaaaggaatagatatgtaagaggactcgtgagttgggttggctataagcaaacctatgttgaatttataagacaggaaagatttgcaggagaaactaaatatcctttaaaaaagatgtttaagttggcatgtgatggtataacagcattatcatataaaccacttattattgcaggtcattttggggttctagctttgctggttggaatgattttaatgtttgttgatattatgaaagctatacttaataaaagcagcgtgctgaattttactatgattataggaattaacatgatgatgtttggagtagttttaggttgtattgggataatgggtcagtatattggaagaatatttgatgaaagtaaaggtaggccaatttatataatttctagtacaacaaattataatagatcaagtaaaaaatataatattattaatctagagaaaaagactttatagagggggaacaaatttgaagaaactaaaattaactaaagagaatataagtatatctttaattttaatattatctgcagtattgaattttgctaatatagggattgaaggatatggcaatagttattatgctgctggagtaaagagtatgactttgaatcttaaaaatttcttctttgtatccttcgatccagggagttttgttacaattgataaaccgccaatgggattctggatacaggctttatttgctaagatacttggatttaacgggtggagtatattattaccacaagcattagctggagtaatttcagtttatctcatatattttatagtgaaaaaatcttttggaagtgttgctggacttatttcaggagtatgtctttcagtaactccagtttttgtagcagcaagtagaaacaatacaatagataacttacttgttttaacactgctatttgcctgtttggctcttacactagctgctgaaaaaggaaaggctaaatatctttatctaagtttaatacttgttggaattggttttaatataaaaatgctggaagcatatatgattggaccagcaatttatataacatatcttctttcttcatctataagattaaaaaagagaatagttcatatttttataggcacatttattcttctgtcagtatcattatcttgggcttttagtgtagatttagtcccagcacaaaatagaccttatattggtagtagtacagataatagtgttatggaacttatagttggtcacaacggattagaaagacttggaattggaagtaaatcaaataaaggatttaatgctagcaataataaaaaagatgatagacaaattcaaaataataccgaagtaagtaatgatcagaatcaacaaatgaataaagaaaattataatggaagcactaatagaatggcaagtggagcagaaaacagaaatggacaaggtggcggaagtctgcagaaagcacctaatgaaggaattccagatggaggtccaggaggacaaggcggacttcaaggcacctttggaggacagacaaaagcaggaatagcaagattattttctaaaaatagtttatctgatcaaatagtatggtttttaccacttgcgttgttaggttttgtagctcgtgctataaaagaaaaactaagattaaagttagataataaaagaaaaatatcactagcattatggattttatggttggtacctgaattcatatatttcagttacacaacaggtttattccatccatattatttaacaatgatggcacctccggctgcagcattagctggaatcggaatagtaacaatgtggaaactttataatgaaaaaaaatggacgtcatggttattaccgatatcattaattatagaaggttttgttaatatgatgatgttatcttatttttcaaataatctatcagatagtataagaaaaataattttaatagccttgttattatgttttttaacttcatcaatattagcaatattaaatttattgagctttattagaagaaaaaataatactaatttaagtgataataaggacatacatttgaaaaagatattgctaggaatttctatggttagtattttaactgtaccatttattggatcaagtgcagcaattactcatagtgtaaatagtactattcctactgctggattggaacttctttcaaacggcgaaagaggtggagcaagttttggcaaggaaagaagtgacaatggtaaaaattcgaagttacttgatttcttaaaaagtaatataacaactgaaaaatattcacttgttgtaccatcatcacaaagcgctgatagtataataatccaaactggtgaaccagtaatggcacttggtggattttcaggatctgataagattctttctttagatgaatttaaagagatggttaagaatggagaagtaagatatgtactcactggtggcatgggcagaggcgaaagtagtgaaattctaaaatgggttgctgaaaatggaacattagttccggaaagtcaatataaggatgtggtatcaggcaatgaaccaaatattaaagacagtaacgatataaaaaataagtcaaaagatgataatcagaatataaattcagtaaggcagaatatgggaacaccaggaggaaataattcggaacaattatatgatttaaaggatgaagcaaatattttaaaataagttttttacaataaaagggcatgtattagtgcaagttattaagatttagctacataaagactaaagagtttaactatttagtagttttagaactaattcttatagtttaatatttgcaagaacaagcccttttttagtagaataaattcttaaaattttaaagaaaatgatcaatatatatgttgcaattcacaatgcacatttcataatttacaattacagctaaaattcttgaaatatttttagaattatgatgaagaattatttttgtaatatatatatttaaaattctcacaagccaaataatcgattaaggctagaatgtagaaacttaatcgcaacatatatttatatattgtgaaaggaaacaatagtgatgaatgaagtaaactttaagaaatatatatttagaataggtttgatttttatattattagtatcaatgttttctagtatttatgcggtaagaaactataaaagtattaatattatggaacaaagtggtggattaaaaaaaatattaaatataagagatggagaaaatttacaagataatataccttcattgaacaatggcgcatctaatttagaaaataataagattaaaagtgataatagccaatatgatccaaatggaatagttccacaaaatgctgattctattgagaaaggaatgaatgataaatcacagcaatatggaagtgtagggataaatggaggtcgtgatattcaatttggatctaatagtaaacaaaggggaaacaataaaaatgctaagcaaggggaggcaaatggcaatattcaaagagggggagtggatgatagatatcttttaagtatcactatatattcattattatttttaattggatcatgtagcgcttactgtttaattaaacgaaaaaatataaaatttaattataaagatgaaaaatccataataattatattaatatttacaggaatttttcttagaatcgcagcttctacacttgtaaatggacataatgatattaatttatttaaaagttgggcagaaactgcggcaaacggtttttcacaattttatgctaatgctagacaagccgattatccacctgtatatatatacatattagggtgcataggaaaaattgcaaatatacaagtatttaattcgtattatatattattacttaaaattccatctataatagcagatgttgcgacagcttattttatatatagaattgggaaaaggtttttgaatacagtaactagtatttttttagctacattttatatttttaatccagcaatttttatagattctacattttggggacaagttgattctttatttacattacttattgttatttcgatatatctgttacatgaaaaaaaatatgcattttcatcagcaatgtttgcattatctgtacttatgaaaccacagggaatcatatttcttccagcacttttctttgaattagttagacaaagaaaaattagaaattttatatatgctgcagtttcagcggtagcaactataattgtaattataattcctttttcagtaaacgaacaaagtccaatttggatttttaatctttacttaaagacaatatcagaatatccatatgcttctgtaaatgcgtttaatttttttggtttagtaggagcaaattataaaaatgataatactacattttttatatttagctatcatacaattggaattatgtttataattctaacaactttaattggatggattttatatataaaagggaatgacagaaagtatatttcggcaatatccttacttcaaattgcaggagtatttacgttttcggttggaatgcacgaaagatatttatttccagcggtagcattatcaattttagcatttatatattcaaaagacaggagattttttataatggctattggatttagtattactagctatatcaacatctccacggttttcttcaaaacaaacacatcagtttttgaggttttattgaaagtaacttcattatttaatgtaatattagttttatatttagtaaaagttattatagataacactgttaaaaaattttctttaaagattgataataaggagagtgaattgttatgaacgtaagaaaagctgtaatacctgcagctggccttggaactaggtttttgccagcaactaaatcccaaccaaaagaaatgttacctataatagataaacctactatccaatatatcgtagaagaagcagttgaatctgggattgaagaaatacttataataacagggagaaataaactaaataaattaatatatcaatagttaggaaaaacaaatttatagcatgagtatagttaattaatgttgggtatattagtaacgtaagataaaaagtaatcaaaggaggagaaatatgagtagttcaactatgactattgcgactaaaaagaagctagaacataaggatcagaatgctataataacgaattcaacatctgaaacaattgttgtatatggaccaagaagggaaacagatggaggaaactatgataattcgtggtatgttctccactcaggagaaactattcctagtgattggcaatgtgacgggatttttattcctaaggatagaaaatttatgcaaatgagcgatgaaactatacaaggtccagtagctgtaaagtttggaagcttgatgccagttacaataatacaggatggagaagtatatatagaaaaaggtagtcacaatgaaggagtatttcataaatctgaaatagattgggatgtaccagactttgatgcggagtattgccaaaatataagcatggcagcatatcaaatccaaccaaataagcggttttaaatctttcttaaaaataaaaatccatggattactttttagtaatacgtggattttttaaataaacattagataatataaaattaatatttaaagtcttgcaaaaaacaaatatttgcgaatcatcaatataaatatataagggcaaaggagtgaaaaaaatgtcaaaagctttatttgtaaatatgttaggtcacggacatgttaatccgactataggaatagttagggagctcataaatagaggagaagatgttacatatatagcaggagaagagtttagagataaaatagaaaaaacaggtgccaagtttattgggcataaaaatttatttgatttatctagtttaattaccagtagtttaaatttagaaactaatgaaaaactattgaatgcccttaatacttttaaagaaataatcgaagagatcttcaaattagatgaaaaatttgattatattatttacgattcttcgtttatattaggtgaagaagttggaagagtattaaatataccaacaatttcttctagtagcatttttgcaataaatgaaaaaataataaaaagtttgttagatctgccaatctcacaaaaatttaagttaaagatggaaggagctaagccaaagattaaagaaattctaagcagtcataattatgtggactttgtcaatgaattacaagagaagtataatataaagtttcctagtatggtagagagatctggaaagaaaggaatgcttaatattgtatatacatctaagtactttcaaccatatagcgaaagttttgatgaaagttataaatttattgggtcatcagtaatagatagaaaagaaagtatcgactttgatttatcaaataatgaggataagaaggtaatttatatatcgctaggaactatattcaataattctattgaattctatgagtgttgctttaaagctttttgcaatatgaatgtaaaagttattatgtctgtaggcagaaaaattgatataagcatatttaaaaatatcccatcaaactttatagttcgtaactatgtaccacaattagaggtattaaaatatgcagatgtatttatcactcatggtggcatgaatagtacaaatgaaggtttatactttaacataccattaattttaatacctcaatcggttgatcaaccttttgtggctaatagggtggctgagcttggcgcgggaattgtaatagaaaaaaatagaattacgccggaagcactaaataaatgtgtagctgagatactatcagatgataactttaagcttaacagtgagaagataggtgaatccttaagggaagcaggaggatataaagctggagttgatgaaataataaagctaaaaaattctatgaaataagatttagctattgataaatcaaatttaattattttagatttattgtatataaacataaggtgctagaatatcgcaaattcatttgaattatgcgatatttattttaaaaatttataatttatatggaagaaattcgcattaaatgaaatataatattataatttatgtatagtatatttattataatatttcaaaaagaaataaagctatatataattgattattaaatttatattaattaaataggagatgcaatatggaattaagagatatatacaataataaaggatataaaactggagtaagaaaagaacgatccgaaaagttagaagatggtgaatattatctagcaactgaagtgtggataattaatagcagaagcgaaatattaattcaacaaagatcaagtaacaaggatgtacttcctaatatgtggggactaactacaggatgtatggttagtggagagggttcagaggaaggagctttgagagaagttaatgaagagataggattatctattgaaaaagatgaattaaattttattcgtagaatatttcgtgaaaattctatttgggatatatattttgtatataaggatgttgagttatcgaaattaatccttcaaaaggaagaagttagtaacgttaaatttgtatctattgaagaatttaataatatgcttttatctggagaactatttgaatatccagaaatttatgatatgttatccctaattgatgataaagttagtgaatattagagggagttagttatattaaataaggcaagaaaatttataatacatatcttaatatttgtttattttaatatataagaatgatctgtgacatgtttgtaacaaaaattagctacaataagaattattgatatttttgtggagggatataatgaaggggaaaaggatattagttgttgatgatgaaccattaataagaaaactcgtaacagattttttaaaaaaacaaggatatgtaacaattgaggctgatgatggaaagaaagctatgaatttgttttctagtgaggaaaatatagatttaataattcttgatgtaatgctgccagaatatgatgggtttactgtatgcagagagataagaaagaaatctaaagttccgattattatgctaactgcaaggggagaggaatttgatgaagtttttggattagatattggagctgatgaatatatatcaaaaccttttagtcctaatatactaatagcgagagttaatgctgttttgagaagggcaaattcagaagatagaggtaaggagctcaaagattttaatggattgacaatagaccatagtgctcatcaagtagttatagatggagaagttgttgatttaagtcctaaggaatatgaactattgatttatctttctgaaaattatggaaaagcattaagtagagagcaaatattagataaggtatggggatatgattattatggagacttaaggacagtggatacacatataaatagattaagaataaagttagatagaaaaagtgattatatacaaacagtacgtggttacggttataggtttgaggaataggtatgagtaagtcagtaagatcaaaactttttttatctataactttattgctagttttttttatctctgctttatgggtattaaataacctatatcttcagcaatactatatcaagaataaagaaaaaatgcttggaaataatgcaaagcatttagttgatatgtacaccggagatccaaatgatattcaagatgaattggataggaccgctaatatagtaggtggtagtattgatattagagataaagagggtaagctaatatataaatcttcaaggcggctaccaaatgaaaaaaatatagttgataatatgggaaataaatttaaacctaatatggagccaccgccagattctgatgttcaaaacgataagattaacaatacatatagtgagggcaagtatacatttgaaaatagaagagatgttcaacttaaaatagactttctaactcttgtaaccaaaataagtaatggtgacatccttgctataagagttccattagtctcaataagtgaaagtgttgatattgcaaatagatttatattaattattggaggagtaattatacttttaggtagcttatgggcattttggttttcaaaaagatttacaaagccaatactagaattaaacagcatagcgcagaatatggctaaattcaattttagtaaaaaatgcagcataaatggaaaagatgaaatcgggcagcttggacaaagtgttaattatctatctggagagctaagtcgggcaattacagaattgaatataaagaataagaaattagaagaagatatagagaaggaaagaaaaatagatgaaatgagaaaagaatttatctcaagtgtttctcatgagttaagaactccgctatcagtaatacaaggctatgcggaaggacttgtaagcaatgttacagaaagtgatgaagataggaaattttactgtgatgttattatgaatgaaactgataaaatgaacaaattagtaagagatttattaaatttatcacaaattgaatctggttattttcatatagaaaaaacagaatttaatttagtatcactaatagaatatgtacttaatagatataaatcaactttcgaagaaaaaagcatagaaattaaatttgaacccggagaaagcgtgattgtatatggagatatgactcgtatagagcaaatacttacaaactatattaataatgcaattaatcatgtagacaataataagatcattaggataaatgagattagtgttaaagataagataagagtgaatgtatttaatacaggaaaacatataccagatgaatatttggataagatatggaatagcttttataaagtagataaagctaggacaagagcttacggaggctatggcttgggcttatctatagtaaaggcgatagcagatcttcatagtaatgcttatggagtggaaaacactgaaggtggagttaacttttggtttgaaattgataagatagatttaagtccagcagcaaattaaaaataaaaatacaaagggagttgtcggtatatcagattaaaatctgttagcggcagctccctaatttatatataagttttcaataagctaatttattcattatagaattatttagtttatatagcctgatagcctaagataagtttcgatgaactaaattttctagaaaatacatattataaattatttttaatttttattttgttcgaaacaccaatgcttgtaccagttaaaacaccacataacatggagtaaacaattgtaggaatttcaatcacataaataccaatagcggcaataaataataaagaaatcattaaaaagagtatacaaaaaaattgcttccatttttgttgaactttaatttttgaatttattatatctgtaaatttgtatttttcatcgaattttaaatagatagcttgacttagtgttagtaagaataccataggcagcaatttgtaaagtaaatctatcatattattttatcatcctccacaaaaataatttagttatttaggtatttaagctctaataatagatatttttatacctaattataatatgggagaaataaatagacaaatagttctttattacattagagtaattatattcttttataagtgtatcctactagagaatagttattatccttaatatttagttatacgcttagaatcaataaggggaaagaaataggtaaaaatttagcttaaatgtttacaaaataaggaaaaatgttttaaaaaaacaaatttaatgaatcaaaagttatgatataattattgtaaaattattacaataattatatcatacaaaactaaaggacaacttaatttctataaattatttaggattaagaagtgtttggttccatactcttagattattggaatgatttaaaatatgcatagctaaaaggaaaacaataatgaataaagggaggaatacaatggggaaggtgttgggaaatagatataataataaattgacaagatttatcctaagttgcattgcaataatatcagtattttttacaaattttatagctgctaaagctacaataggaaatagtatctatgaagtgagttcaaataacattaatatgattagggaacaacataaatttatcattgatgcacctataaaattttataatgacataaaaagattagagcaggtaatagacttcaaatttaaagttctggatttttttccggaagggtataaagtgcaagaacttcaattaaaaaaaatttctgataaagataatgttttagaaatagtttatggaaataaagatggaatacgttcattacaaatatcggaacaagatccttcagaatcattaaaagtgatagaaaatgggaaatctaaggcattagaaaattctcaggtggaaatctctaagcaaccaatgaaagtaggagatataaatggactaagtgttattttaacaaccacatttccggtaagaaaagctatggaaaaccaattaagtgaaataaaagctgttaataattatttttcatggaaagatgatggattatggtatagtgtggaatataaatcggagtctaaaagcgaaaggagtagtaataactcattagagctttcaagtgatgatataaaaaatatagtgaaatcgttaaaatatcctgaagatacaaaagatttaaattattgtataaagaatcttaatggtggagatgtagaaatgaacatttatgacagagatgatatagaagaagcaaaaaatgctctggaatttgatcctaaatttccaattagaattaataataatataaatataactaactccactgctagattagttggagatttgaataataacaaagaaaaaacatgctatgaaataaataatctttattcaaacaaaaatggttcgataacatttactcagtctgcgaattcatcagtttatgatgaaatgatgaaaaataagtatattaaaattaataaagaaggaaatgtagagaagaaaattcaagaattaagaattgaaaataatcaagtatttaaacgttcacaagaaggtatcgtgcctcaggttaattatgtttggaaagaaaataacatatattatagtgtgatattttttgtgaatattgaaaattgtgatgaaattgttaaagaatttatgaattcaaagccactagaatagagctatttaaatagaatattgataaatatattatggtaagaagacttttataaaaatagtagggaatataacagacagaccctactattttttaattaaaaggtcaattagcgctaattatagagggggtaccccaaatttcatttacaaagttagcgctaattttaaagtagattgtaggatattctccatagtatatataaccattccttaatatcgtaaaaggaacatttttactaccatcttttaaatctaagaatatctttttacatttatcattatttgtatagtcatctaaagaattctctatattttccggtagatatggagttgaatcatctagttcttgaacaaaagaattaagaaaattaggatcactagttgtatagaagttttctttttcattattcgaatcactagatgtttgagtttgaactctggcgtttacgatatttcccgggagattaaattttccaaaaaaatcatttccggtagttattgtaattccattaaggcattcataaatttcagggtgatttgtcccatcacttaaagttacattagtcattattctaaaatcttcatcatatccgtttaccgcatatacatcattagtacctatattagaaatgatatttttagaatatgtgttcataggattaaagttatttaattcacctgttgtagtaccgatttttctgcctaaaatatcttttgaatctattaatataggcgcgcggagatatacatttccgttgtaaacaattaacggaaccattttcactgatttagttctatcatgaagatcaggtatctgaaattttggaatgtatacagtattcgaactaaaacttctcaaggttgaattaatggtcaaagcttcattcttgttagaattattagtagtagtgtttgaagttgttgcatattgtgatgaatttatatcatttgaaggtgttagattatcattattatcattatcagaattctgggaaactgatgctacattttcattagtgctagtatttcctaaagttgtctctttagaatatttaactttattattactattattattgttgtcatagttattgttagtacttggtgaattatcatgaaaacttgaactattttttataccagtagagttttcagcttttacatttgatttattattatcaatagtatgattattatttttgttagaaacaggagaagaaattgaattatcattagtgaatttatctaattcatcttttgaggcatatgtcgtatttccagaatctatattttggtgtttatatgtattatttataattagtttaaaactagcggtacctaaaagtattaataagacagcagctgcttttaatccaagtggagaataatttttatttgtttttattcttaattgtgaagcatcatttagtaattccatttttagcttgtctttaaattcttcacttgcttttattttggaaaaagagctcttaattttattcatattcaaaatcctcctttagtatagattttagtaattttcgtcctctgctaagttgtgaacctacagtagattcctttatgtttaaaatattagaaatttcagaaatactataattctcataataatataaaaaaacgatacttctatattttactggcaggctaagtactgcttggattacatcattatcttcctgagttgtatcaacaaaatcatcttctaatgatgtggtatttttaaaataagaagactttaatttatctttacttaaatttatagcaactctaattaaccaggatttctcatgtgtttcgttcttaaaatcaggtcgtttttcaagtagttttataaaaacctcttgggttatgtcttcggcatcacttaaatttttcatatatgaatatgaaattcgaatcagcatatcggaatacgtttctattaagtaatgaatgtaacttttgttattatccaactcatccatttgatttttaccccctccaatacttaatacgatttataacaacaaaattttgcaaacgataataattttcttagtttatgatgaatttcaatttattagaataagtatatacgagtaataattgtatatagaatactttaaaagatattaagagtttaatcaattaaaagtcgaaaaataatattttcatatatgtctggcattaaactaaaaaacatataatataaaaacactttttctgaaacatagtctagcaactgatagggagaaataaaggtaaaagaaaactatcactttttagtaatagaaatgaaaaagctgtgcaaacttatatatgaataatatagtaagggagatagagacatgaaaaaagtattatatattaaagcaaatgcaaaaccggaaggaaaatcaagaacttttaaaatttcagatggatttatagatgaatataaaaaaaataatcctgatgatgaaattattacattagatttgtataaagaagatatagatttcttaagaagtaaggatttagatacagtatttggacctaaaaatgaggaaagcaaaaatcatccaacacttaagtatgcatatcaatttgcagaagctgataaatatgtgatagcagcaccaatgtggaatttaagtgttccagcgatattaaaagcatatgttgattatataagcgtagtaggaatttcgtttaaatacacacaagaaggagctgtaggacttttagaaaataaaaaggctgtatatattgcggcaagaggtggttcatatgctgaaacaccatatgagcttgatggtatctatttaagaagtatactaggctttttcggaataaaagatattacaactatttcagctgagaaattagatgtacaaggagaaaatattgataaaatactagaagaagctatagataaagcaaagggaactgctaagaatttctaaatttaacaatattatttattaatcattattagctattaaattaactagttaataatgattaattttatctatccggttatttctagatacaaatgttagaaaactttcataaattatagataacacaatcataaactatacttagactatgagatatattccaactggaagaaaagtatattattcatttcggagagttatatgaataaattcaggtcttagttggggtatctatataaacaaatctttttaggtagtaatcataaactttaatacattttctatattgtaaaataatttggtaactattaaactaaattatatatgttacaataataaatctatgtttaaagatttaataagctgaaatttattctattaagattaaatgcagaaataaatatgttataaacggaggaattttacatgaacgataaaagcatagaaattatgaaaaaaataattgaggaaaagaaacaaaaaaataataatattaagaataatcaaagggcaaaaaaagttataggaaaacattctaaaggtgtaaaagtgggtaacggtggaggtttatttgataagtaacctgaacagcacaaagtaagtatttaatactaaatttatattaactagaagaagtatattataaatgaaaggcggagaaacttaatgatgataataatttccccagctaaaactttagatttttctaagtttaatgaaacattaccaatgactaagccatatttcttaaatgaggctagagaattagttgaggagttgaaaaaatatgataatctatctttggagaagcttatgaaaataagtcctaagctagctaaattaaatactcaaagatttcaaaattggtcagagtctttagaatctgcaagacaatgtctaattgcatttaaaggtgaggtttttaagggacttgatgtaggaagctatacgatggaagattatttttatgcaaatgataacttaaggatattatccggactttatggagttttaaagccttttgatggaataaatctttataggttagaaatggcaacaaagttaggtattggtgcgcttacaaatttatatgattattgggggaataaattaatagataatattttgaaagatatcaaaagacgtgaaaataagaccattgttaatttagcttcttatgaatattttaaagcaatagaagatattaaaacaataggcgagataagggttataacaccaatatttaaggaatatagagatggagaatataaaataataactataatggcgaaaagagcaagagggctgatgacctcttttattataagaaataagatagaagatttagaagatttaaaagaatttaatcacgatggttatgaatttaatgaagagttatctaatgaagcagaattggtatttactagagatatacataataggaactagctaatttttgatttacttgcttttagacaagctaatttaatgtattttacataaaggaggtgaaactagatgattgatatacttttattaggttgcggaggcggaatgcctatgcccaatagatttctatcagctacgctcataaactatagaggacggaaaatcctgattgactgtggtgaaggaactcaagtatcaatgagaatatcaaatacaggatttaagtctatagatattatttgcattactcatatccacggagatcatattgtaggacttccaggacttcttggaacaataggtaatagtggaagaactgaacccataacaattataggaccagaaggaataagagaaacagtagaaaaattaagagtaatagcaaattggttgccttatgaaattaatataatagaaaatcctaaagaaacctttaaattatttgatggtagtataaatttagacgtagatatatcagttctagagttagatcattctgcaccttgtataggttattgtttttattttaaacggcagccaaaatttgatgtagagaaagctgaaaaaaataaagttcctaaaactctatggaataggttgcaaagaaatgaagaaaatattgtgttagatggtgttttatatactaatgatatggtaataggagacgagaggaaaggaataaaagtcagtataattacagatacaagaccaattaaaaatataatagaatttattagtgatagtgattatttcatttgtgagggtacttatggagatgataaagatttacctaaagctattaaaaataaacatatgacttttagggaagcggctgatttagcactaaaaggcaacgttaaaaaacttttattaactcattttggaacggccatgaacgaaccagaagaatacttaaataatgcaaatgaagttttcgataaaactataattggatttgataggtataaaacaactttaaattttaatgaagattaatccaggagaaacataaaaccgatttttaacattagttttatgtttttttacttttagaatttggttatattaatataaatgtgtatatgattttggagttatacttgatagtgagaaaattaacatgaatttgagttaggtgtgaatttgaaaaatgaaattatataatttttgcatatataaatagccaatgtaataaaaaaagagtataatatggtagaaattatataataattggagacaaaagaaaaaaggagaaatcaagaaatgttttttaaaaaaatatgttatgttttttatatgctgtgggtaagggtaaaaggagttaagcatacatttattttgagaactcagggtgatgaatctgctgaggaatatgtaagaaaaactgcatatctttggagtaaattcactttaaaaataataggaatagaattagatgtgacgggcacggaaaatatacctgaagagcaatgcgtgtttgtaggtaatcattcaagcatattagatataataatattgctttatactgtgaataagaagatgggctttattgctaaaagggaattgttaaaaactccaatactaggttactggttgaaaaagagcaaatgtgtacctttagacagaagtaatacaagagctgcgattgcgtcaattaatgaagcaatcgaaaatattaagaatggaagttctatggttatatttccagagggaactagaaataaagaaggaaaagtagggcaattcaaaaaaggaagtttgaaattagcaactaaatctcgagctataatagtaccagtaagtatagatagggcttctagagcatttgaagatactagaaaatttaaacctacaaaaataaaagtggtatttgggaaaactattgatactaaaaatttatctaaagaagaagagtataatttagcagagaatataagaaatacaattatagataacttaaaataaagaagagttaataatttttagaaccaaattatttgtattaatactaatgcacaattttcagtaaataatcttacgggaagaagaaatttattttatataataattatagatataatttaaattatgtttttttctttgagattacttagttgaatattgtgcatttgttttatattacttccaaataatttatgtgatatactttaagtaaatactagtagaagattaaggtaaataattattttataaataaactataaggatgatttgatgaaaaagacaatagggattttagcacatgttgatgcagggaagactacattttcagaacaagtgctttatcatactaaaagtatagcaaatagaggaagagtagatcataaagactcatttttagatagtcataatattgaaaaagaaagaggaataactgtattttctgatcaagggacttttgaattaaacggttctacatattacttaattgacactccaggtcatattgattttagcacagagatggaaagatctatagaaattatggattatgcaataatcattataagcggagttgaaggagtgcagggtcatacaaagacagtgtggaatttattaagaaaatataagattccgactatatttttcattaataaattagacagaactggagcagataaagatagagttataggagaaataaaaagagatttatctagtgatacgtgttatataggcaataattttatttatgacagcaaagaagaaatagatgatataaacaaatttgatgagttcaatttaaatgagtatctagtagaatttataagtgagcataatgatgaacttttagaaaaatatattgaaggaaaatatgattatgatctttggataaaagcgtttatatcactcataaaagaaagtaaagtgttcccatgttttgggggatctgcacttcaagatgatggaataatagaattcctaaatattatagatagattaacatatacagagtataaaagtaatgaaaaattttctgggcgtgtatataaaattcgtcatgatgaaaatggaagccgtgtaacttttattaaagctttaaaaggaaagttaaggattagagaggaagtaagctatggtggtgaattcgtaaaagaattagatcatgtacaaaataattctaacccaattactgagaagataagcagtataagaatatataatgggaaaaaatttaaagcagtagatgttgtagaagctggagatttatttgctgtgacaggtatttcaaaggcagtagcaggagatggtattggggatctaaaagaaaaaacacaatacgaaatgactccaacattaatgtctaaagtgatttttgataaaaattgcaatgctcgtgaagttttaagggatttcaaggtgctagaatcagaagacccatcactaaatgttacatggaatgaaatttttcaggaaatccatgtacatgtaatggggaaaattcagctagaggtattgaaggagttagttaaagaaaggtttagtttaatagttgatttcggtaagtgtcaaattatttataaggagactatagcagaagcatctataggtcgtggacactttgaaccattaagacactacgcagaagtgcatcttaaacttgaaccattgccaaggaatagtggaattgtttttgaaaataaatgtcatgacgatgatttgactcaaggaaatcagaatttaatcagaacgcatatttttgagagagagcatcatggtatattaacaggatcgtctataacagatataaagttaacactattaactggaagagcccataataagcatacttgtgggggggattttagggaggcaacatttagggcattaaggcaagggttagagaaagcttataatatattattggaaccatattataaatttgtaatagaagcctctaatgaacatgtaggaaggattttagcagatattcaaaaactaagtgggacttttgaacctatagaaatgctagaaaataaagtgataataaatgggaggggaccagtctcaacatttatggattacagtatggaagttatagcttttacaagagggaaaggcagcataaatttgatatatgatggatatgatttatgccataatagtgaagaagtaatagaagataaagcgtacaataaaaacgctgatattgaatatacgtcaacatcagtattttgttcgcatggtcaaggttatttggtcacatgggatagagctgatgaagaaatgcatattgaatttgatgcataaataagttactatagtaaatttgcatttaggtaattactcattttaataattataatgcaaatttaataatttggagataaaatgaaatataaattggagtttgaaaagaagattatagaatttgagttaattcggaggaaaagaaaaactatatgtattaaaattgaagaaagtggaaaagttgttgttagtgctcctttaaaaactagcaaagattatattatgttagttgtgagaaaaaggtcagattggatttttgaaaagcagaaagaaatgattcaaagaaattcaaaaaagactaagagagattttacaccaggaagcacatttatatatttaggaaaagagtattcttttaaattaatttttgatgaaaaaataaaaaacatatctattcaacttagtggaaattcgaataatgtatatagaaatggtgaagagctattaggagatatagatatcagtaatgaggagaaaagttttattatacacacaaatacaatggaaatggaaaaattaagggcagcatttgaaaagtggtataggaaagaaactttagaaatagttacacgaagaatagagtattattcaaaaaattttagagacaaggttacagatataagagtgaaggaacaaaaaagaaggtgggcaagttgcacatggaaaaatgttattctatttaattggagatgtagtatggcaagacctgatgttttagattatatcgtcgtacatgaaatgtgccatatggaccacaggaatcattcaaaggatttctggaatagagttcatgaaataatgccggattataaagaaaaacatgaatggcttaaattaaatggattaaatatgtatttataagatataacactgtaaaatataatatgtggatttggaggtaacgctttgtttttgtatgttacctctttttataatcacatacttctagattagcctatataacattttcgtctaattgtgtcagtctttgtgtagatgcatctatatgcaaattgtacgctaaacctaagacaactaaaagtcccccgatgattttggctaatggaatagtgttttgtatcacacaatccaaaatgattccagtaaaaagttgtccaataaatattaataaagtagcataaaatgaggacatctttggtgttataacactagataagatgacaacaattacgcctaatagaccacctagataagcataaagtggaagagtgtgaaattgttcaagtaaaaatttatcttttataataagaaataatagtattgatgcaactaaaccagtaatataattaaaaaagcttgattgtaccaaccctaccttctcagaaagtctagtatttagaattcttgaaattactacaatagcaccggctgctatcgaaattaaaacaaaaaacatattaataattgctcctttcttttaaaaaaatgacatgataaaaattccagctattataactaggagtcctataaattttttcttattaaagttagactttggtacatctaagaatccatagtgatcaaaagctaatgaagttaatagttggcctagaagtcctaatgcaacaggaagagaaactccaagagctgcatagcttaagttattaaacataacggtgaaaacactaatagccccagcaatataaagatataatggtaagttattcttaaaagtaattttaatctttttaaagataactattcctataacaattatcaatcccacaaagtgaattacaattaaggaagaatagttgccaagtccgtcagataatttagcgttgaaagcaatcataatagttataagtacgcctattagtaatgataaaatattatacataagtgctatctccttaaataaatttattgttttgtttataaatagttttaagagttacgtttaaaggaaagttgctctttatattgtaaattactataatgagatttatataggacaaatgtcatgtttaaaattaattttttattcaatatttattaggagttgacttcattgataaagatagaagataatatcaggctttcagaatatataaataaaaataaattagaaaacctattttcagaagatatggaaagatatatggaactatatatgtttaataaaaatgaatatatctgtagggaagaagagattttagaaaatatgtattttttagttgaaggaaaagctaaagtatctaagcatctagaaaatggtaaatcattattaatatcattttatagcccgattacaataattggagatgttgagtttgtgagaaataatccaactgattgtagtgttcaagcgattaaggacacttactgcataggaattaggtttgatattgtgagaaggattctaataaatgattgtaagtttttggtgaatttatgtagctatttgagtgagaaattaacaaatggaagtactaatacgtcaataaacttattatatccccttgagaataggcttgctagttatataatagcattttctgaaattgaaaattctaatactagaaaaattgtatttagagaaaattatattgaaatagcagaattgctaggaacaagttatagacatttaagtagaacattgaataagctttgcttagaagggattttgaaaagagataataaggaatattttattcaagattatgataaattattgtatttagcaggagacttatataaataacaaattgttgtatttacttatttttaggatctaccagatatataattagcatagattgatgcaaagtcttaatttagataaatatgcattgaattatatattaagaatggtatcaaaaaaatgtcctctactaaatttaaaattatatttagtagaggacatttttatttatacaaaattttgatttagtattttcaaactgctggtggactggattttatatttctacatttcgtcttcttattttaaatccaattgcatcctcaatttcgttgacgtcttttatgttctttggatctataaacatgcatgtatagccgctttcgccagctcttccagttctaccaatacgatgtatataactttccacgctttcgggaatatcgtaattataaatatgtgttattccgtttatatctagtccccttgcggcaacatcggtagcaattaagtattgaatttctgcatttctaaatgatttcattattcgttctcttttattttgaggaatgtcactatgcaatttctcgcaattatatttacgagtatgcaggactgcttcaagttcatcgactcttctttttgttctacaaaatataatagccataaatggattatcttcatctagaactttgcacaaagcatctcgtttttttctatcagtagtttctacaatatcttgttctatagcgtctagagctatatcatcttgttttatgaatacctcaataggatctttcatatatctataagctagtttttttacagaagagtcaattgtagctgaaaagcaaagaagttgtttttttctaggcatcttacttataattgattcaacttcgtttttaaatcccattagcaacatttgatctgcttcatctaagataaaagtttttaacttacttaagtcgattgtttttctttctagatgatctaataatctgcctggagttgcaataattaagtgaatattattatttagtttttttaactgcgaagcaatatctttacctccgtaaacaggtaatatattgatatcattaaattctttgagtttgttagcttcattagttatttgtattgcaagctctcgagttggagtcaatataagagcctgaatttcattagattttgaatttatattttctaaaagaggaagtaaaaatgcaagggttttcccagttcctgtagctgcttctgcaatgacgtctttaccgtctcttattttggggatactttgcttctgtattggtgtgggatcagcaatccctgatttatttagtattttgattaaatcgtcactaagacctaattttttaaaattcattattttcatacctttcataatttacaaataaagtatcaatttaagtatttctttttatgttagacactattctttataatataattatctagtattaaaagtcaatctactatataaaagagttttacaaaataataaaatgtgttaaattataataggaagaataaaatgtatttacaattatgggaaaaagatagtgttttatatatttataaagaaagatttgaagaaaatcgtatgtaaaacaaaacttttaatagttgattttctaaatgtgtcttaatataattaaatatagaagaaaggcaagatacggtgattttatgaagatttcaacaaaaggtagatatggattaagagcattaattgatatttgtatattctcggtttcagagatggttactgtaaaaagtatttctgaaagacaaggaatatctgagagatatttggaacaaatattttcttctttaagaaaaggaggcattataaatgctaaaaaaggagctcaaggaggctactttttggctaaaagttctagagaatttacaattggagatatattaaatgttctagaaggtgatttacttctaattgatatagagaatgatgaaaatgaaatagaaaattttatgagcgaaaatttgtggaatgttataaataataaaataattaattttttcaattctataactttagaggatttggttaacgattataaaaaatacaatagagaagatatgtattatatttaatcatgatttagtagcagtagatatatatttactgctactaaatatgtactgcctaccattactgtaggcttattttattttagcttaatgctttttaatttgttttttaattcaaacatttctaattccaaggaatctatttttttatctaagatttcattacgtttagagtcaattactttagatttttcatctaaaattctatctatatcggccataactactaataattttttaaataaatcatatgctgtttccatatgaaaactcctttcattaaaatataaataatccattaagtgtagatgataattaattactaggtagtatattcaatctaaataattattgtgaattatatatttctatagcgtttttagttaatattaacgtgagttcgatggaaaaatttaagggataaaaaatcccatcaaaatgttttattatataagtgcgaccaaataaataaaacaaaggatgggattttatgcaaaacttattagtagaaatattttatgatgtagacaatttttgtattggatttgaaaattactgtaaaagtcatttcctaacggaaaatagcgaccgcaaatttgcaatgattaaaagtaaaactttatcattaagcgaagttatgacaataactatctactttcatttgtcaaattacagaacttttaaatcatattatattgagcatgtgtctactgttctcaaaccgtattttcctaagcttgtgagctacaataggtttgttgaattaatgcaacaatcattagttgcactactattatacatgatgaaatttagaactggcaagtgcacaggaatttcttttatcgattctacaactttgaatgtatgccataatagaagaatacactctcataaggtttttaaaggaattgcagaacgtggtaaaagttcaacgggctggttttatggttttaagcttcatcttgttgttaacgataaaggggatattctctctttttatctaactccgggaaatgtagatgatagagaaattaagactatagaaatattagcaaaagatttatttggaaaactttttggtgacaaaggttatttatctaaaaagatctccgatattttgtattccaaaggtattcagcttataacaaagataaagaaaaacatgaaaaataaattaatgttaatggaggataaaattcttcttaggaaaagagctatcattgaaacaataaatgaccaactaaaaaatatatgtcagatagagcataatcgacatagaagttttactaattttgcggttaatatagtttcaggattgatttcgtatagttttcttcctaagaaaccttctcttaagttggacaagtatctaactatggaataattggaatatcgaaccacaagattacaaggatacttttttgctttttttcataaccatatttacccataaaatattctagcttttcgaactcacgttaatattatagataaatatctatgttaaaagggcttgtattatttttaagactatgttattataatttcaataaattaaaacctttgataagaatagtagataataaaacttagtgtaaagagagttcgatgtttggtgagagtcgagtactgaagatattattgaatgggtctttgaggtgacattttgaaatcttaagagtaggaatgtacggggagtcagccgttaaaatgacaggatataattatggggattttgtgtttgactgaatttcataatagtatctgatagcatatatacattaggtggcatagcgaaatttatacatttcgtcctatttaggacgggatgttttttatttttaataagtttaatatgttatttgttcttataaaatatttttaattctaataaatagagagttagaagtaaaagtacttactattttccatattaaattttactattatttaaagattaaagtagctatgagaaataccgtttagattgtatttgattttgggtggcataacgagtcacttcgtcccaatattcgggatgaagtggctttttttatataatttaacgaaaattggggggagaatcatgattaatatttcaaaggaaacttttaatcaaaaaaagaagggtgaatgtattttttcattaataagtgaatttagaggagatgaaattactcctattaaaatttttggtggattcaaaggcaaaagaaaatttattttcgaaagtggaagtaaagaaaattatttcggtaggtattcatttttaggagaaaatccttataaagaaatttgtggggatggaaaagaagaaatagatgaactcaaaaaagagagtagattaaagtttgataatagtactaatattttttcatttaaaggcggggctataggatatatgggatatgattccatacagttttatgagaagaaacttaattttaataacaaagatgatttaaagcttcctataataagatttaatttttataacaggtatatttgctacgatcattttactcataaagtttatattatagacaacatattaaagaacgatgctcgagagtacgatgaaataatcgaatcacaatatgaatatataaatagtctactttataagccgatagtaacagagccatcgaaaggaaagaaagatgtttctttcagatttcatacatctaaagaagattttgaagaaaaagttagaaaagcaaaagaacatatattggcaggagatatattccaagttgtattatcacagagaatgacttgtgaaactgaaaaaaaccattttgagatatatagaaagcttagagaagagaacccttcaccgtatatgtatctaatagattatgatagctatcaagttataggatcatcaccagaaagtttagtatcggtgagagaaggtaaagttattacaaatcctatagcaggaactagaaaaagaggtgaaactccagaaattgataatgcacttgaaaaagaattaattgaagataaaaaggagcttgcagaacatgttatgcttgttgatctaggaagaaatgatataggtaaagtaagcaagataggaacagttaatgtgagcgattttatgaaaattgagaggttttcgcatgttatgcatattactactaaggttgttggggatataaaagatgatttggacggatttgatgcattagcagcatgtcttccagcaggaacagtatctggtgcccctaaaatcagagctatggagattatagaagatcttgaagatttcaaaagaggaatttattcaggagccgttggatatttttcttatggaggaaatatggatacagcaatttctataaggacgttaatattaaaggataaaacggcttatcttcaggcaggagctggaatagtatatgattcagttccagaaaaagaatttgaagaagttcaaagtaaactaatggctttaaaggaggctttaagatgattgctttaatagataattatgattcatttacatttaatttatatcaatacttaagtgaatttgcagaaacagtggtttttagaaatgatgaaataactgtagagaagttgagagaactaaacccaaaaggtatagtaatatccccaggaccaggcattccagagaatgcaggtatatccatagaggttgtaaaagaattaggaaataagattccaatcttgggtatatgtcttggacatcaaagcattgcagaagcttatggaggaaaagtaattagagcaagtgaaatttttcatggcaaaacatcaaaagttcaagtaaaaggaaaggatatatttgaaggaataccaagaaaattagaagttatgagatatcattcgcttatagttgagaatagttcacttcctagctgtcttgaagtactagctttaactgttgaaggcaattatataatggcacttaagcataaggaatacaacgtttttggacttcaattccacccagaatcaatatacacagcaaaaggcaagcatattattggaaattttgtgattaatatttgtggggacacattaggcgattaaaattaaatattaaagaatgtgatattaaatgtgaaagcgctgaaataagcaattttataaattttaagggggcattaaaatgatcataaatgacgcaatcaagaagttggctttaagggaagaattaactgaagatgaagtaagaggtgtaattaatcagattatgaaaggggaagcaacttcggcacaaattggaggttttttagttggccttagagtaaatggggaaactccaaggcaaatattaggtgcagttaaagcaattagagataatggggtaaaagttaaaatagaaaacacagaacatttgattgatacctgcggtacaggaggagatggttcaaaaacttttaatatatctacagcagtagcaatagttgcagcaagtggtggtgctaaggttgcaaagcatgggaatcgcgcagtttcgagtaaaagtggttgtgcagatgtactagtcgaacttggaataaatattgattttgatgaaattcaaagtaaaaaaatcattgaggaaaatggaatggcatttctatttgcaccaaaatacaatggtgcaatgaagaatgtatcaaaagaaagaaaagaacttggaataagaacaatttttaatttgctagggccattagcaaatccaacaccaattactgggcaactaatgggagtatatgatggagctttactagaggatattggggaagtattgctaagtctgggattaaagagagcaatgattgttcatggtgatgatgggttagatgaaattacgattactacatcaacaagtatatgtgaagttaaagatggaataattaaaaattacaaactagatccagaaaagctaggttttaagaaagctactttagatgatattaggggtggagaagcaaaagaaaacgcagaaataataatgaaaattcttaagggggaaagaggtcctaaaagagatattgtagttttgaactcgggggccgcgttatacgtagcaaacttagttgattccatagaagatggtattaaaaaagcatcagagctcattgattcgagagcagcttataaaaagtatgaggaactttctagtttgcaagtgatagtttaaataataataaagggggcaatgtatttgattttagatgatattattgaaatgaaaaaaataagggtagagaagagaaaaaaagaaattcctatgaaagaattagaaaaacaagcattatgtagagttgaaaatgaagtagaagcaagttttagaaacccttttataaaggcattaagaaaagatgggttatcagtaataggagaatttaaaaaggcatcaccatctaaaggcgttattgtaaaggactttaatataaaagaaatattaaactattatacgtatattggaatagatgtattttcgattctaactgaagaagatttctttttaggatgtgatgattatttaaaagaaattagaaaaatttcgcatactccaatattgcgtaaagattttataattgacttctaccagatttatgagtcaaaagttttgggcgcgaatggaatattgcttattgctagtgttttaggtgaaaggttaggggaattttacaaagaagcaaagagacttaatttagaaccattagtagaaattcataataagacagaactagatttagcacttaaatatgattgtgaaattattggagttaataatagagatttaaaaaatttcaatgtttcgttagatataactaaagaattaattcggtgtattccaaaagagaagataataatagccgaaagtggaatcatgagcatagaagatttgaatgtaattaaggaatatggagtagatggagttttaattggagaattatttatgagaaaaataaatgattctgaatttaaagctaaatataaagagtttagaaataataagtaatttataaatctaaaataatattagattatgtgaggatttgatatgattcaagttaaaatttgtgggataactaataagagtgagattaaatatttaaatatattaaagccagaatatatgggatttgtttttacaaaaagtaaaagacaggtgacattaagagaagctaaacagttatctaataatttagataaagaaataaaaatcgttggagtattcaaagataattctatagatgaaattttagatgtcactaatgcactacctttaaatattattcagcttcatggaaaagaagatgaaaactttatatcatcgttaaaggcaagtgtggagaaatcagtaagtatatggaaagcattatcaataagcgatgctgaaaatataaaaaaatatgtagatcataagtatatggatttaattgataatatccttatcgatggagataaaccaggtagtggagaaactttcccattagaagatatatgtgaattattaaaagtagattctaataaggaaaataattacaatctaactaataatacctgtagtttctttttggcaggtggtataaccccagaaaatgtagttgaaagaatagagaaagtaagtccttatggaattgatgtctcatcaggggtagaaataacaaatgaagatggaactagaacaaaatcttttgaaaagatgagaagtttaattgaaaaagtaagagcaattaatattaattgagtcaagaaaggggaaaaagtaatgaaaggtagatttaacgaatttggggggcaatatgttcctgaaactgtaatgaatgcacttatcgaacttgaagatgcttacaataaggtgatagatgataaagaatttatggatgagtacatgtattatttaaattattatacaggaagaccaagtccactttattatgctgaaaatatgacaaaagatttaggtggggcaaaaatttatttaaagagagaagatttaaatcatactggtgctcataaaattaataatgcgttaggacaagtactcttagctaaaagaatgggtaagaagaaggtcatagcagaaacaggtgctggacaacatggcgttgcaacagctacagtggcagcaaagtttggcttggaatgtaagatatttatgggagaagaggatataaagagacaagctatgaatgttaagaagatggaacttttgggtgctgaagttgttccagtattaaatggagtaagaacattaaatgatgcagtaactgaagcaattagatattgggcctcaaatgtagaagatacatactacgttttaggaacagctgctggtcctcacccatatccaactatggttaggaatttccaaagagtaataggtgatgaagctagaaagcaaatattagagcttgaaggaaggctgccggattatatcttagctccagttggtggtggaagcaatgcaataggaatattttatccatttattaacgacaaggaagttaatcttattggagttgaagctgcaggtaaaggtattgaaactggagaacatgcagcaaccattacaaaaaaggaaaaaggaatattacatggaatgttgagttatgtacttcaggataatgatggtggagtacttgaagcatattcaatatcagctggtcttgattatccaggagttggacctgaacatgcatatttagctgaaactaatagagctgaatatgaaagcataacagatgaagaagctgtaagagatggatttatgtatttaacaagaatagaaggaatagtaccagcacttgaatcgtctcatgctgtagcatatgctaaaaaattagcacaaacacttagcagcgataaaatcataattgttaatatttcagggagaggagataaagatatggatgctgtgcttgcatatctaggtgaaaaataatgaatagaatagatttatcatttattaaattaaaagaagaaaatagaaaagctttaataccttttgtaacatgtggggcagatttcacggttgaagaaacagctgatttgatagtgtctttagaaaaagaaggagcaactatagttgaaattggagtgccttttagagatcctcttgctgatggcccagtaatacaaaatgcatatactaaagcgcttcaaaatggaacaaagataaaagatgtatttaggtgtgtagaattaataagggaaaaatcagaagttccgattgtattaatggtatattttaatgttgtatactttactggagtagaaatgtttctaaaaacagcggcaaaaagcggtgtagatgggcttatagttccagatgttcctcttgaggaaaggggagatcttgataaaatttgtgaagataatggcatatacttaattcctctagtggctagaacttcaaaagatagaatagcagcaataacaaaaggggcaaaaggttttgtgtattgtgtatctacgaatggaactacaggagaaagaaaaactttagattctggaactcatgaatatttatcggaagttagaaaaaatgtagatataccaatgtgcattggttttggaatttcgtcaaaagaagtggtaaaagaagttaaagaccattgcgatggagtaattgtaggtagtgcaatagttaagagaatggcagaaggcaaagaagccgtaatagatttcgtgaaagatttaagtgatggttttaaataatataacgcatattctaatatgagctataaaaaatattatacttattattattattattattattattattattattattattattattattattattatattttcagttaaatccaccttatcgtgaagataaagtggatttcttactctgatgttaaataggctgaaagagaacaaagtataaagtaggatatttgttttacaagccccatttttcaatttgacaactaattatactttcggtacatattcctcttttgtaccagttacatgatctacatattttattaaatttagcttcactaaaatttttgtaaatagtatctataagttcatgaaacgtatatactttattttctttgatattgtatgtttgtaaagtactataatccaattcattgactttattctgagttgtacagcaattgttaacttgtctattaggacaatcattacatatggcatcacatcctacaataaacataaccttggaataaggattttccttaattgaagttactaatttatccatgcctcttgtaaaattcttactatatcctaatccctgataaaaaaataagcaatttatatgatgtggtctaagtaataacatttttataactccatctgatttttcttccagtatatagcatataaaaacagtttgtcaaccttgtgaaattattaggttaactatttatatgatcgatttatgaaatagtttatgttgaaaataaagtttatgataaagaagtctataaaatatctgaatatgaattttttataggagcaaaatataataatacatcagttaaaaaatagttttattaatgtctattgaatataaatagtaaattgtaattaataatgttataattttgaggaaatgaggtgtttaagtttatgacaaaaaagactagcagaaatacagatatattaaaagatactaaaaatacaacatctcctaaagtttattctttattagtagaactagtaaatgctgatagggaagatttagctgaagatgtgctaaagatagattatttattaacatatgcaaataattgcgtaaaggataaagatctaagagaggcaagggataccttaggaattgctagaaatagaattgataaactaattgataatagtgtgaatgttgaatatttagttcatctttatgataaaattaactcgaaattataaattattagagattatttaaattatatagataaaatataaatattaatgttataataaattaattttcattaagtaattgatgattaaaatataaaatgtaaagtgagaagaataaatgagatttgaaagtttagaaaaaaccataaacaaattagataatgatattgaagccttaagaagggttaaacaatatttatcaaataaagatgaaattaatgaaataagcgatttattaaataaggaaagacaagtatatgcggatgaattgtatataggcgatgctgtagcttataatgagagtttagaaatattaaagcaattgttaaataaagaattaggaaaagatgaacaagttaaattattagaagatataaaagaaatacacggaagaaagtcgccaaatgtcagtaaaaaaagtcatggacttaatgcgtggcttaagtttcttgatatccaatgtgagtggattgaaaatcctaatagtgattggtcaacattaattataaaaggatttataccaaggaataataattaaaatattttttcaagaacaagtaggttttcatattcatgagaacttatttttttctgtaagtttgtataatcttctatgctttaataaaaaatagaatagaagtagaggggattcgtagcatattatattttagggtgttatacacacaaatagtttgaattactaaatataggagtaatttataatgtaaaaataaagaaaagtcattattatataaaacgcttaataccagtgtatcgctcagcactataatcagataaatatagaacttttatgaaatataaaaataatttaattttatagtataaatttagagtcactgggtatagtaataatgtaaaatatttagttaaagataaagttataaaaagcaactacattttataaaactatctaaaatgtaagatagaaaaagttttcggaaagttattgacaagaataagcagcggtgatatgatgtaattcgtcgctgaaaagcataaaattcaataacttaaagcttataaaatgtttaaaaagttttttaaaaatgttgttgacaaagtttgaaagcgatgatatactgagtaagctgtcagaaacgacagaaacttgtaaagccttgtaacaagaaggtgtagaaagaaaaattggtctttgaaaattgaacagaataacataaatatatttaagtaaaccagcaattctttatttgagtaagctaagattaaactttttattgagagtttgatcctggctcaggacgaacgctggcggcgtgcttaacacatgcaagtcgagcgatgaagctccttcggaagtggattagcggcggacgggtgagtaacacgtgggtaacctgcctcatagaggggaatagccttccgaaaggaagattaataccgcataagattgtagtgccgcatggcatagcaattaaaggagtaatccgctatgagatggacccgcgtcgcattagctagttggtgaggtaacggctcaccaaggcgacgatgcgtagccgacctgagagggtgatcggccacattgggactgagacacggcccagactcctacgggaggcagcagtggggaatattgcacaatgggggaaaccctgatgcagcaacgccgcgtgagtgatgacggtcttcggattgtaaagctctgtcttcagggacgataatgacggtacctgaggaggaagccacggctaactacgtgccagcagccgcggtaatacgtaggtggcaagcgttgtccggatttactgggcgtaaagggagcgtaggtggatatttaagtgggatgtgaaatactcgggcttaacctgggtgctgcattccaaactggatatctagagtgcaggagaggaaagtagaattcctagtgtagcggtgaaatgcgtagagattaggaagaataccagcggcgaaggcgactttctggactgtaactgacactgaggctcgaaagcgtggggagcaaacaggattagataccctggtagtccacgccgtaaacgatgaatactaggtgtaggggttgtcatgacctctgtgccgccgctaacgcattaagtattccgcctggggagtacggtcgcaagattaaaactcaaaggaattgacgggggcccgcacaagcagcggagcatgtggtttaattcgaagcaacgcgaagaaccttacctagacttgacatctcctgaattacccttaatcggggaagcccttcggggcaggaagacaggtggtgcatggttgtcgtcagctcgtgtcgtgagatgttgggttaagtcccgcaacgagcgcaacccttattgttagttgctaccatttagttgagcactctagcgagactgcccgggttaaccgggaggaaggtggggatgacgtcaaatcatcatgccccttatgtctagggctacacacgtgctacaatggctggtacagagagatgctaaaccgtgaggtggagccaaactttaaaaccagtctcagttcggattgtaggctgaaactcgcctacatgaagctggagttgctagtaatcgcgaatcagaatgtcgcggtgaatacgttcccgggccttgtacacaccgcccgtcacaccatgagagttggcaatacccaaagttcgtgagctaacgcgtaagcgaggcagcgacctaaggtagggtcagcgattggggtgaagtcgtaacaaggtagccgtaggagaacctgcggctggatcacctcctttctatggagaaatctagaccaacatgatgtttggctagtacagatacattattatgtatcaaaatataaaatacttgctcaaaggttgcttaagtatttgttctgttcaattttgaaagactaagtctttcaaaaaagcgtagcttagtagcgataactgcgaagaagcaaaagttttatgaaatgaagcgtacttcacgtacgtgaatgaataaaatttgaggctgacgaagcaattgacgataataagtaagcagatgttctttgaaaattgcacatagatttaatgtatatataaaatacaacaaagccaagaataatattctttgtgaaatgattaaaccaaattggagcaatatgaaaatatttttacaatataacataaagcgtaccaatttgcgcagcttattggtggcaagtgcgaggagtcgatgaaattttggagtgaagcgtacataaacgtacgtgaacgagaaaatttcagtagatgacgaagcaattgacatcaataagcaagcaaaaggtcaagctacaaagggcgcatggtgaatgccttggcatcaggagccgatgaaggacgcgataagctgcgataagcttcgggtaggcgcacatagccagagatccgaagatttccgaatgaggaaactcacatgggaaaccccatgtatcataaagtgaatacatagctttatgaaggtatacccagggaactgaaacatctaagtacctggaggaagagaaagaaaaatcgattttcttagtagcggcgagcgaaaaggaaagagcccaaaccagagatttatctctggggttgcggacagaacataacgagaaatcatagttaattgaacacaactggaaagttggaccacagtgggtaatagtcccgtaagtgaaaactatgataatcagttctgcaccagagtaccacgagacacgtgaaaccttgtgggaagcagggaggaccacctcccaaggctaaatactacctgatgaccgatagtgaagcagtaccgtgagggaaaggtgaaaagaaccccgggaggggagtgaaatagaacctgaaaccatgtgcctacaaccgatcagagcaccttatgtgtgtgatgatgtgctttttgtagaacgagccaacgagttacggtatgtagcgaggttaagtacttaaggtacggagccgaagggaaaccgagtcttaatagggcgactagttgcatgctgtagacccgaaaccgggtgacctatccatggccaggttgaagcgagggtaaaacctcgtggaggaccgaaccacgttgctgttgaaaaagcatgggatgagctgtggatagcggagaaattccaatcgaactcggatatagctggttctcctcgaaatagctttagggctagcgtcggaaaatgtgagtagtggaggtagagcactgaataggctagggggcatagcgcttaccgaaccttatcaaactccgaatgccacatactatcagtccggcagtcagactatgaaagataagttccatggtcaaaagggaaacagcccagatcgtcagctaaggtcccaaagtgtaagttaagtggaaaaggatgtgggatttctaagacaactaggatgttggcttagaagcagccactcattaaaagagtgcgtaatagctcactagtcaagagatcctgcgccgaaaatgtccggggctcaaacttaccaccgaagctacgggttcacgctattttgcgtgagcggtagaggagcgtcgtaatcgggctgaagtcgtaccgtaaggagcggtggactgattacgagtgagaatgttggcattagtagcgagatgtaggcgagaatcctacaggccgaatatctaaggtttcctgagtaaagtttgtcttctcagggttagtcgggacctaaggcgaggccgaaaggcgtagtcgatggacaattggttgatattccaataccactataatcgttattatcgatggtgtgacggagaaggataggatgtgctagctattggatgctagtctaagcgtttagggagttgggactggcaaatccgttccaacaattctgaggcgtgatggggaaggttctacggaaccgaagtatctgattccatgcttccaagaaaagcatctagagagagaagtagtgcccgtaccgcaaaccgacacaggtagatgaggagagaatcctaaggccgacggaagaattgcagttaaggaactaggcaaattgaccccgtaacttcgggagaaggggtgcctgagaaatcaggccgcagagaataggcacaagcaactgtttaacaaaaacacaggtctctgctaaagcgaaagctgatgtataggggctgacgcctgcccggtgctggaaggttaaggggaacacttagcgaaatatcgcgaaggtgtgaacttaagccccagtaaacggcggccgtaactataacggtcctaaggtagcgaaattccttgtcaggtaagttctgacccgcacgaatggcgtaatgacttgtgcactgtctcaactgcaaatccggcgaagttgtagtgcgagtgaagatgctcgctacccgcgattggacggaaagaccccgtagagctttactgtagcttagcattgaatttcggtattgtctgtacaggataggtgggagactgggaaactagggcgtcagccttggtggagtcgttgttgggataccaccctgatagtattgaagttctaactggatgccatgaaactggtgacaggacattgttaggtgggcagtttgactggggcggtcgcctcctaaaatgtaacggaggcgcccaaaggttccctcagaacggtcggaaatcgttcgaagagtgtaaaggcagaagggagcctgactgcgacacctacaagtggagcagggacgaaagtcgggcttagtgatccggtggtacctcgtgggagggccatcgctcaacggataaaagctacctcggggataacaggctgatctcccccaagagttcacatcgacggggaggtttggcacctcgatgtcggctcgtcgcatcctggggctgaagtaggtcccaagggttgggctgttcgcccattaaagcggcacgcgagctgggttcagaacgtcgtgagacagttcggtccctatccgtcgcgggcgtaggaaatttgagaggagctgtccttagtacgagaggaccgggatggactgacctatggtgtaccagttgtttcgccagaagcatagctgggtagctaagtcgggaagggataaacgctgaaagcatctaagtgtgaagcccacctcaagatgagatttcccatagcataagctagtaagaccccttgaagactacaaggttgataggtcagaggtgtaagtatggtaacatatttagctgactgatactaataggtcgagggcttgaccaatataatcaagttgtaatatacattaatagaggaagctcgactcactggcgttcgctgagtaagttcgagtatccaaatataaaatttggactctcacttatgtgcaattttgaaagaacaaagttcttttaagtagtaattatttaatataattgctgaaaaaatagtataagcgatgaacttgggttattttttctaaggaaacactaactcacatacgttcgttggtgtgctgtttttcaaccaaatcgaagatttgggaaaaacatgcatctcgtaatgatggcatagaggtaacactccttcccattccgaacaggaaagttaaggtctatagcgccgatggtactgcatgggagactgtgtggcagagtaggacgttgcgaggtaataaaaaatatgctcagatgataacttatcatctgagcatattttttattataaagttttttgatttaaaataataattaaagaatcatttaatataaaaattaagatttaagcatttgtaataactactatacaacgtgtaactaattttttggacacgactatactggtattaatagagataagcatatatattgaaatttatttctatgcacaattttttatagttagatttcactatttgatactgtttaagaatttgctaactatcattaaattatgattgtgataaattactttagaaggtgagattatgattaaattagtactagtaaggcatggagaaagtctttggaatttagaaaatagatttactggatggacagatgtggatttgtcagagaatggattaaaggaagcaagtagagcaggaaaaatacttaagaaaaatggttttgtatttgatgtagcttatacatcagttctaaaaagagcgataagaacattatggataatattatatgagatggatttggcatggattcctgtttttaaatcatggagattaaacgagaggcattatggagccttacaaggattaaataaagcagaaactgctaaaaaatatggagaagagcaagttcataaatggagaagatttgtaaatgtaaaacctccagaattgactaaagaggataccagataccctagaaatgaatataagtacaaggatttaaatgaagaacaaatacctttaacagaaaatcttgctgatactgaaagacgtgtgttagaggaatggagaggaaagatagctcaagatttgaaagcaggtaaaagagtgataatatctgctcatggaaatacattaagagctttagttaaatatttagatgatattccagctgataatatagctgatttgaatattccaacaggaatacctttagtatatgaattggatgagaagttaaagccaattactcattattacctagcagatgaggaataagcgataggataaattggtgtaaaaatctgaattcaagaaagaattacaataattataataaagaaatataatttattgcaaagacagtaaatcttctaaaattttaaattatgattgttaatgagtgaaatactgaatcacatgtttaaattatatatagatttactgtttttgtgattttattcaaattaaatataaaattttgtactttttgtttatatatttctattaatataaagcgtataattacatagttgtggagtacagaattcaaataggatatttttgtggtatcgtactaaatgtttgactaatataaattaatttttactaatatctttaagggggagacattaaatgatgataactagaaatttaacaaaaggaaatccggcaaaattgatattgctgtttacgattcctttattaataggaaatatatttcaacaattttacaacatagcagatacatttattgttggccgtacaataggcgtaaatgccttagcagcagtaggatgtacaggaagtataatgtttttaattttagggtttgctcaaggtttaacatctggactttcaatcattactgcacaaaaatttggtgcagatgataaggaaggagttaagaaaagttacttcacaggcatagttattagcatgataataactataattcttacaactataagtacgattctagctagaactatattagaactaatgaatacacctgtagaaattgttgatgatgcatataattttgtagtagtaatatttattggaataatagcgtcaatgttttttaattttttttcaaatattattagagctttgggggatagcaaaactccattaatatacctagtggtagcgtgtattttaaatataattttagaatttgcatttatattaatattcaagatgggagtaactggggcagcttgtgcaactgttatagcccaaggagtatcggcattattgtgtatgtggtacataaagagaaatttgcccatacttaagttaaagaagagtgacttaaagttatccaaagaaacttttttagaacacattaaaatttctctaccaatgggatttcaggcatctataatagcaattggagctataatattacaatttgcattaaatagccttggagctacttctgtagctgcatatactgctgctcagaaaatagatactctcgcaactcaacctatgatgtcatttggtataacaatggctacatacacagcacaaaattttggtgcggaaaaaattgatagaattaaagaaggcgtaaagaaatgtgttttcatatcagtagcatttagtattatagtaggccttataaatacttttgcaggttattttcttacaggaatttttgttggatatgatcaaaaagaagttattaggttgtcgcaaatatatttaacttcaaacggattaaattattttttactttcactactgtttatatatagatatacgcttcaaggattaggacaaagctttattccaacagtagcaggaattatggaattattgatgaggacgttcgctgcaattatattatcacgaccgttaggttttttaggcgtatgtatggctaatccattagcatggcttggagcatgtattccacttataagcgcatactatattagcattagaagaatagatatagaatattcaaaaaagaaaagctgtttgtatgaatcaaatatagatgcatgcaattatataagtaagtaaaagttagtttatatagtaactttgtattgtcgtaagatttatgtaataaggaatgaaataggattatttaacaccaataatcttagttcattccttatttcattttcttgaatattttaattatgtttaaatctatacctctaatagagtgacttgcaattaaatattgaatttatatttatttcttagcttctaagataaatcatatattttgaacaaataacttatcctagatgtatataaaatgttttaatatttaatgaagttatgacgtgtttgtttagaaaatcagtgaagatgagcagaggtttgatagatataataacagaagaatttttagttttgataaaactaagtttagtatagaagattaaaaggaaagtgaaactagataaattaatattggtgaaaaatttccacagatatttgaatgtaaaatactgaatatataaaatttataatatatatacttaagaatataaaataggttttatataaatgctataattagaagatcgggagtgagattatggacggaaaatcagtaataaagtggcataaagatataaatggaaaaagagtagtagattctttgataaaaaatgattttgatgcgatatatttggcaactaaagatgaggtaatagaatttattatgaaatatgtgaaattaggtactaaggttggttttggtggttcagcgacaatatctgatatgaaaattcaagataaagtgagggctgctggagggagagtttatgaccatggagaagcatcaagtgtagaagaggctatgtctattgcaagagaggagatatttagtgatttatatttatgtagtagcaatgctataactttagatgggactcttattaatgtagatggaatgggaaacaggatatcagctatgacttttggacctagaaaagtcataattgtagcaagtgttgataagatatgtaaagatgaagcagcagcttttgagcgattggagaatatagcatcacctatgaataataagagacttgagaagccgaatccttgttcaaaaactggcatatgcatgaattgtaaatcgcaaactaggatatgcagagtatattcaattatgagaagaaagcctatgaccacagatataacagtaataattatgggagaaagtggaggcttttagttacaatgaattaaaaatacttaatatattttgataattatattaagataaacatacatttttataaagtggatataaattaaaaatttaataaagtatttattgtaataaaatgaaaaataatatataaatatatatgaaaataaaaatgctagaattaataattaacatttttagcatttgttattaaaataaagataaaaagtgaggaacaaaatggaagataatcaaaatatacaagacaaaataaaaagttttttagaagagaataggataaatgttaaaggtggaactataacaagtgaaaagcaattatcactagttttaaatgatcttgcaatgggagatttaaaaaaaggaaagctagataaggcattatattttacagaaaaagcagctgaattcaataaagaaaattattattcatattttataaaaggtctagtatatagaaagttaggtaaaaatgaagatgcgattgaggcatttaatgtatattgtaaagactctgatgattcattaacccacatatatatgggactttcgtatgcagaattaggaaacatagaaaatgcattagatcatcttagaaaaggcgaaaagaacatctcaaaaaatgaaaaggaagatcataaattattaatctgtgcgacttatgagtgtataggaaatatatatttgagtaaagaaaatatagtagaatttaatgagagagataaatatagtatgaactataaaagtgcagtaagatattataaaatggcactaaaaataaataggagaaatcctgatttaatcaatagattagctgcatgttattatcatattgaagatttaaataaagcattatattgctatgagcaagccgctaagattgtagaagataaaagcatgtatgtagaagcaatcaaagaaatgcatgaagctggtgctaaatcagagccagcgggattttagtctataagaaaattgtatagataaaaaagcttaatgttatattttagtaacattaagcttttttgtgttttaataaggtttaatttctacataacgaacgttttttaataatatggttctaatatttatatttgtagagaatacaaatgtctttcgtgggttgacagatgagcagatataggataatatataatttgttaataatagtcggattaaattaataaattaataattttatactttagggattaatttatataaacaatttcaatagaaatattaaaaagaatagtaatatttaaacaatgaatagctggttaattattttctatgttttttgtaaatcttattgtcaaattattatttttttacagcgtacaccttaagaaaataaaactaatactagggggcttattttatgaagaaaaaaatttctttacttttggcgctggctatgacaactacatttacgctggcgggatgttcaaaatcaaatactaaagcaaatatagacagcgatgttataaaaattggtgtatttgagccaatgaccggtgctaacgcagctggtggacagctagaagttgaaggcgtaaaacttgcgaacaagctctatccaacggttaatggaaaaaaagttgagctggtttttgcagataataaatcagataaagttgaagcggctagtgcagcatcaaatcttgtggaacaggaacaagttaatgcaattataggaagctggggaagtggaaactctatggcggcaggagatgttgtacaagatgccaaggttccagcagttgcagcctcagctacaaatcctcttgtaacagctggtaatgattattactttagagtttgttttatagatccttttcaaggaactgttatggcaaaatatgcagcaaataaattacaagctaaaaaagtagcgttactccaagaggtttcaagtgattactcagttggaatttgtaagttctttaccgatgaatttataaagcttacaggagataaagatgcaattatagctaaagctaattacaatacaggagatcaagattttacagcccaacttacaaatataaagagtagtaatccagatgtaatttttgctccaggtaattttacagaaggagctatgataataaaacaagcaagacagcttggaataactactccaataattggaggagatacttgggaaacgccagagtttttagatataggtaaagaagatgttgatggaacagtattttctactttttttgcaagtgagactcctataactaacgaatcaaaagtctttcttgatgaatatagaaaagaatataataaagaaccagcagcggtttctgctttatcatatgatgcatatttagtaattttagatgcaattaagagagctaattctatagatccagtaaaaattagagatgaaattgcaaaaaccaagaattttcctggtgcagcaggagtaataactatagatcaaaataacaatgcagtaaaagacgcagttttaaagatagttaaagatggtaaatttacttatcttgatacaataaaacctgaagaaaattaattaggggtgaaaatatgactttaatgaatttaagcacatttatgcaaaatttagcaaatggtatctcactaggaagtttatacgcacttatagctataggatatactatggtctatggaatattaaaacttataaattttgcgcatggagatatatttatgatggctgcatatttcggatttttcggagttgcaacatttggactaccttggtactttgcttttataattgcagtggttataacagcattccttggaatgggaattgaattcactgcttatagaccgttaagaaatgcacctaagatttcagctttaatttcagctattggtgtatccttcttacttgaaaatttagcagttgttttatttggaggaagacctaaagcatttccagatgtaaagctatttacagatgtaatagttataggtggaatttcaattcaaagacttacttttataattccagttgttacaatagtaatactatttgttttattacacttagttaataatacgaatattggtatggcaatgagagcagcttcaaaagatgttgaaactgcaaggcttatgggaataaatgtaaataagacaatatcatttactttcgctataggatcgggattggctgcagtgggttctatgatgtggtgtgtaaaatatccacaaatagttgcacttatgggaatgatgccaggtcttaaatgttttatagcagctgtaattggtggtataggagatattaagggagcagttattggtggttttatacttggactagctgaaattatgttaattgggttcttccctggacttacagggtatagagatgctttagcatttatactattaatcgtaatattgctatttaagcctacaggaataatgggcaaaaatttaacagagaaggtgtaaaaatgaacaataaaaataaatttttaaatatagctcttattgcaattgtatttttactcttatttgttgcaaataatagcttggactcttataaaattagaatcttaaatttatgtgcaatatatacagttcttggactaagtttaaatctaataaatggatttacaggattgttttcactaggacatgcaggatttatagcagtaggtgcttatacaactgcattgcttacaatgagtgaaaaagttaaaaatcaaaatttctttatggaaccattaatggcgccttttaatcatatatcggtaccgtttattgtagctttgttaatagctggtcttttatcagcatttatagcagttttaataggtgctccggctttaaggcttaagggtgactatttggctattgttactttaggatttgcagaaattataagaatagttattactaatatacaaggtttaactaatggagctttgggtcttcgtggcattcctcatatgacaaacctatattggagctttggaatagcgattgtgacaataataatattgctatcacttataaatagttcatatggaagagctttaaaatcaattagagaagatgagattgcagctgaaagtatgggaataagtttattcaaacacaaagtaataggatttgctattggtgctttctttgctggagttggaggtggattacttgggaacttaatgggaacaattgatcctaatatgtttaagttcagccttacgttcaatatacttcttataatagttattggaggaatgggaagcgttacaggaacagttatatcagctttcatcgtaacaatacttggagaagctttaagatttttggatatggaaaaacaatttgatttgggaatatttagcttttcaggaataccagggcttagaatggttattttctcaattttgcttatgataatagtactattcttcagacatggaataatgggaacaaaagaattttcttggaaatcaatatttaaatattctaatgatagacctctagaaaaaggaggagacaagtaatgacattattaaatgtacaaaacgcgactatgcagtttggaggacttacggctgtaaaagactttaaccttcaaattaatcaaggagaaataatttctttaattggacctaatggagctggtaaaactacagcttttaacatgattactaatgtttatactcctactagaggaaaaataatttttgatgatattaatattacaggaatgagacaagataaaataacgcaaactggtatagcaaggacatttcaaaacataagactttttaaagatttgagtgtacttgataatgttttaatagcaaatcatgttcatattaagtcaaactgtcttgaagcgatgttgaagcttcctaggtataaaagagaagaaaaagagatggttgagaaatctttagagcttttaaaagaggtaggtcttgaaaagctaagaaatgaaaaagcaaattctcttccatatggaatgcaaagaaaacttgaaatagcaagagcacttgctactaatccaaagcttcttcttcttgatgagccagcagcagggatgaatcctacagaaactgatgagcttacagattttgttagagaaattaaggataaattcgatttaactatatttatgatagagcatcatatgaatatggttatgggtttatcagatagaatacaggtttttgaatatggaataactatagctgaaggtacaccttctgaaatacaaaatgataaaaaggttatagatgcatatttgggggtatctgaagatgattaaaattgataatttagtagtcgcttatggtggaattgaagcattaaaaggaataagcttagaggtaccagaagggaaaattgtaactttagttggtgccaatggtgcaggaaaaagtactacgctaaaatctatagtaggtctagttaaaccaaagagtggaactataagttttgatgatggaactgatttaactaagcttaatacggaacttatggtgaaaaaaggtatagcattagtaccagaaggaagaaaagttttttcagaccttacagtactagaaaatttaaagataggtgcttatacaagaaaggataaatcaggtattcaggaagacttggaaaaggtatattcacttttcccgagacttaaggagagaacttggcaattatcgggaactctttcaggaggtgagcaacaaatgcttgccataggaagagcactaatgtcaagaccaaagttaataatgatggatgagccttctttaggacttgcaccaataatcgtaaaagaattatttggaattataaaaaaaattaatgaagaaggcatgacagttctactaattgagcaaaatgcaaatgcagctttaaaaattgctgatattggttatattatggaaactggaagaataacactaagtggctcagggcaagaattactttctaatgatgaaattaaaaaagcttatcttggtgaagctttataatatgaaaattttcgtatttaaagaagaaatggcaagtcaggaaataacaaaatactgacttgttattttttgcatttaagaaatttattttattcttattgctaaaatgtagtgtgaaaaaactataatttttttatactgtgtatactaataagattaaattgatatttaaatattagggggacatatagatgaaaagaaaaatttcattgcttttggttatagctatgatgacttcttttactttaggaggttgtaattcaaaatcaggcacaagagctaatgatgatagtgatgtaataaaaataggtgtatttgaaccaatgacaggtgcaaatgcagcaggtggacagctagaagcagaaggtgcaaaacttgcaaataagatttatccaactgttcttggtaaaaaggtagaactagtttttgcagataataaatctgataaagttgaagcagctagtgcagccgcaaaccttattgaacaggagcatgttaatgctattataggaagctatggaagtggattctctatggcagcaggtgatatagtacaggaagctaaggttccagctgtaggggtaacttgtacaaacccattagtaactgcaggaaatgattattattttagagtttgctttattgatccttttcaaggaactgttatggcaaaatacgcagctaataagttaaaggctaaaaaggtagcaattcttcaagaggtctcaagtgattactcagttgggatttgcaaattctttactgatgaattcaaaaagctaactaatgataataatgctgttgtagcaaaagcgaattataatacaggagatcaagatttctcagcacagcttacaaatattaaaggaagcaatcctgatgtaatatttgctccaggtaattttactgagggagcaatgataataaagcaagcaagacaacttggaatcacagccccaataattggagctgatacctgggagacaccggaatttttagatataggtaaagaggatgttgaaggaactgtattttcaacattttttgcaactgagacacctataactgaagaatctaaaatttttcttgatgaatatagaaagcaatataataaggagccagcagcagctacagcattagggtatgatgcatatctagtaattttagatgcaattaagagagctaattctgcagatccagttaaaattagagatgaaatagcaaaaacaaaagattttccaggtgcagcaggagtaataacaattgatgaaaacaataatgcagtaaaagaagctgttttaaagatagttaaagatggcaagtttacttatctagatacaataaatcctgaatagaattaaaaatgtaaatactttaataaaatagataatgtatattacaattaagttccaatattgtggccagaattgaataacttgatttacaaggagtctaaatgtatacttagtattcgaagatatataaaataatatttatagatagaggtaaatggttgtatgttttttataggtatatttggcattgaaaataaaaataaagaaataaagattttagacaatttaaactgtaaaaaatgtaataaagtttttcgtggaaagctgataaaaaattttaattattttcattttttctttattcccctttttaagtggaatataaaatattatataatatgtgatggatgtggaactaactttagtatttcagtggacaaaggaaaagccattgagaatgacgaacctgtaaatataacttattgggatcttgaggagctagaaagcagtaattatagagatgattataatagtggtatatgcaggaactgtggtagggaagttgatccaagttttcaattttgtcctcattgtgggaataggattaaattttaaatttaaaaaaaatcaagtagccgtttgtagctacttgattttttttctctaattaaaagtttcataaaatcacattgattcgagtaaaaaatgatagagaaatctttaaatacagaaatatattgtaatagttattgaaatggaataacatgggttttataatatataatgatagaataggtttcagattccaaaagttaaaattgactttaggataataatttattaaagaattagtgattatgaaagaggatattagatgtttaattatataatatttcttggaatgtttttaacggcatttgtttcggcgcaattatgcatatttttattttataaaaaaagaagaatacatttaaatggtcttttaggtgttattttatgtgtttttatatatagtttattttattcttttgagttaatatgtcctaatttaacctttatgaaattgtttactgggatagagtatataggaatagcatccattccagctttttgggtcatcatggctctagaatatactaataaaagcaggtatattactaaaaagctctacatgttgttattttctttgcctacggtattagtggcattaaatattactaatgactatcatcatcttttttataaaagttacacagttgacattgcagataatctatatattgcaaatcttaaaccaggcattgtatatgttatatgcgtaatttttgtaaatgtatgcttcatagtagggaatagtctgtatttaattttttatagaaaagaaaacagtttatataaaaagagaagttttaaaatcatgcttacatcatttattccttgggttggatattggatatacatgtcaaggattacgtctataagaatagatatagttccaatttttatgggaatattttgtttgatatatacatacgctttgtttaaatcaaatatctttgaaacagctactattgctagacatgttatttttgataatatttctgaagcaatattagtattagaccaagaaaataaaataatagatatgaataatatagcagagaaaatttttaatataaaatcaaagctagcaataggacaagacgtatgtacagagtttaaagagtatcaggaaattattcaatatatatatgaagaaaaagaaactagcttcaactgtgaaattaaaataaagaacaaactctattattttaaaggaaaacttacactaattaataataatagagggaaggggaaagttattgttttgagtgataatactgaacaagttttaatgattaagaaacttgaatactacggcatcactgatgttttgacaggggtatataatagaaagtatttctataaaattgcaaaagaaaaaattgaagcttgttctgataagaaacatatgtctctattaatgatggatatagataaatttaaaactattaatgatacttatgggcatcctataggtgatattgttctaaaaaaggtaatgaatatttgtaaagaattactggggaaaaaatattatataggaagatatgggggagaggaatttttaattttactagataacgctaattcagaaaaagctttagaaattggtgaaacaataaggagaaggattgaaaatttagaaatactccatgacaataaatgtataaaaataacatcttcttttgggatatttacatcagttagagaaagagatttggaaaatatgattaaatttgcagataaagctttgtatgaagcgaagagtttaggaagaaatagggtttctataaaaatggggaatagttagattattataaatggtgtagtacattgattattacaaagtaaaaaaactttaaatagttattacaatactatttaaagtttttctattttaagatatttaattaaaaaattcatgaactaaaaatacatttttagtttttgtttgcttcaaatctatcaacatgtaatatagaaggaaataatttcatccatagcattacaacgactatagttccaatgcctccaataagagcagcgggaacagtcccgaataaagacgctgtaattcctgattcaaattcaccaagctgattagaagttcctatgaatatcatatttacagagctaactcgtcctctcatataatctggagtattaagttgaacaagcgtagatcgtataacaacgctaattacatcggaagcacctaaaatcaaaagagcaatgaaagatattataacagatctagatattgcaaaagctatagtagacaaaccgaagaatataacagctatgaacattgtcttccctaccttgtgttttaatggttttcttgcaagataagcagacattaataatgctccaacggcaggagcagatcttagtattcctaaaccaaaagaacctatcattagaatgctacttgcgtaaattggaagtaaggcagttgcgccaccaaacaatactgcaaataaatctagtgatatcgccccaagtattataggtctgctctttataaaagatattcctgcgaataaagattttatagtagttggctcagatttaaatttttctttcttgattgaaatctgatatataagaatccctgatattaaatataagataccagttaataaaaaaactagtgttgggccaaaagaatataaaattccaccaacagctggtcctataataactgcaaattctgaaactgaagacattaaagcagaagctctcgggaaaatctccttactaacaatattaggcaataaagcttgcattggtgggccttcaaaagaatgagctaccgctataaagaaaatgagaattaaaaaccgttctttagtaattaactcattataattcccaaaagccataataaaaataaacacgctttgagttacttggcttaaggttactattcttctgcgatcatacctatccgatatatgtccgacaaaaagagagagaaaaagcattggtaaaaactgaactagtccaacaagacctaaataaaatgccgaatgagttaatgaatacatctgccatccaatagcaactgtaatcatttgatatgcaaaattagtggatacacgtgctgtcattaatagtcttaatgatttatttttgagcaaagcagaattatctttagttgaaatcattatatttcagaacctttctgtatatagattattatggctaaataaacattcataaacataagtaaattataggtttataatatattaaatagcattattaatagtatataacggagaagaacacgtatcaagttaataatggaattattttcttccgattctataagtaaagcataaactcttaaaatttttaaggaatctattaaatggattgtgtgatttgatataataaataaatttattaacataaaatttattggttaaaaattagctttgggttaagatataataaggcaaaaaattcgaaattgatggagaacaaaatggaaaaaagttattttgaaaaagaattcatcaactgtaaataattatttatgttagaaatatgataaaataaacattaagctagtattaaatattattaatacacataagaggaggatgtaatatgagttttggaaatcttcagaagataagtaatggaaagagaacttttggaataactccgcatattccaggcggttttattactatagaaactatgcaaaaaattgtggatgtagcaaaaaaatataatggtatattaaaaataacttcaggacaaaggatattaataactaatcttaagcaagaagacttagaaagcatttggaatgaacttggaatggagccagcagttaaaacacaaaattcagttaagaatgttgaaatatgtccggctggatactgtaaaagatctaaatataacacaattgggactggaatgaaactttcaagaaaatatcaatggatggaaatgccatgtaggactaaaataggagtagcaggctgcaggaatgcttgtggaagcgtttatagtaaagatattggagtaatagcagataaaactggattcattgttgtagcagggggatcaggaggttataatccaagaatggcagatatcattgctaaagatataacagaaagccaagcgttgagtttagttgataatatttttgaatattatatagaaaatgcagaagcaggagaaaagttgggattttttattgatagaattggaattaatatatttaaagaagaagtactaaaaaatataggaaatgctttatagtattaagctttaattatatttaagttcaaaataattgttttaggaagttaagtgtttaatttatcctcgattagatgcctagttttatagctgttttgaaaggacatgcgaatgtcgcattttgatcagaaaagtcaattaaataagaactgggcatcgatttgaggtttgattttttattttataataaagattatttttaactaatgtactttttgtaaaatctataactctttcgaattgagtttagtaaaaaatccgaaattggaaaatgaattttacggaacaatggtagatagactttaaagtagattttcttaaaatcctcccataaatagcaaggttcgtttttgtagaagtctgaaacatccacaataacaccttttccataaagcatcataacattttttacatgaacatcatgaggatttaagccttgatgtttagcgtaatctaaagcttcatcaatatcctttatgacagaaactggaataaaaatacctttctttaaacaattatataaagtttctccctccaatcgttttaaaataagaaaattattatgaccatagtaacattgagaataagcacgatgtattcctagctttttatatacatttatttcatcctcaattccaagttttcctcttgcataaatttttacagcaaattcaggaaaatcaggatgatataagacagacgcataatttcctgaaccaagaagtatccatggagatggaagatctctaactacaattggatcatttggatttatactttgaaggtttaattgaggcagtaattcatctgcaactatattttttatcttttctatagaattcacatttattcctccaattttttttattatatacgttgcaaaattaattcttcaccacaattctaaaaatattacaagaatttcagccgtaattgtgaaaggtgcattgtgaattgcaacatatatatgataattataatcgagagaatatatgaatgcaaaaataaagaaagataagaatgataaagccaataactataacaagaattgtttaaatagatgaaatgatcgagattattataatcgaggcaaatgtatactcttgcttctttgtattaaaaatatgttataataagtaaaaatcaaattgtttattataataatggacgaattggataaacatatatagtttaaatttctggaggaaaaatgaataaaatagaagcagtgctattcgacatggatggagttatatttgatacagaagctatatacttgaaagtatggactgaagtttttaaaaagtataaatataaaatgactaaagatatttatatatctgtaatgggaagaggaaggaataatgttatcaagacatttttagaggcgtttgggaagaatttacctataactcaaatgtacaaggaaaaagatgagaaattatcaaaaataataaaatatggacaagtgcctatgaaagatggagttaaagaaatattagactttttaaaggaaaataattataaagtagcgctagcaacatctgcaaaaagagatagggctttaatacaattagaaatggaaaatatcatagaaaaatttgatgcgattgtttgtggagacgaagttgtaaatagtaaaccccatccagaaatatttctaaaggcggctaaaaagctttgtgtaaatcctaaagattgtattgttatagaggattctgctgcaggcattgaaggagcctataaagctaaaatgataggaatacatgtagaagatcttaagaaagccgacaatgatatactaaagtattgtcatagaagctttgagaatttactagatattaaggcgtacttaagtaagaatattgataggtaataattaatatattcagaatttacaccaaattgtgttttcataaatatttattatcttactattttgataaaatgcggtacatagcttggagattattctaaaataatacttattttagacaacaaatttattaataataaatttgttgtctttttttataaaataatcatataatatttaataattttctataaatatatgttataatagattggcgacgcataaaatagagagcttcgtatttatctcgttattaacttaagggggaggataataagtttattattaaacgtgttaagaaagttttattaacttgaagaattcgcgaaatatggtgtatcatatatatggattttctttattaaaatagtgcgttaatagatacaatagattattatgcgacggttttgttaaaaataataaacaattacactaaataatatatattttatatgattagatttgaaaataaaaagaagacaaaatgttaaggagtgaatattatgggagataataaaaaatcttttatacaaagtgcattaggttcagttttttctgtttttagcgaagatgaattaaaagaactgtcaaacggcagaaaaattgctatatgtggaaaagttaacaatccagggataatagaagttccagaaggggctacccttaatgaaataatacaattatgtggtgggcttataaacaaaagtaactttaaagcagctcaaataggacttcctttcggtggttttttaacagaggatagcttagataaagaatttgattttggaatattttatgaaaatattgcaagaacaattattgttttatcacaagaagactgtattattcagtttgaaaaattttatatagaatatttactagcaaaaattaaagatggatcttataagaactatgaggttgttaaagaggacataactgaaatgtttaatatattaaacagaataagtaaaggtgtgtctaatatgcgtgagatttatcttttgagaaatcttgcagtgacagtgaaaagtaagatgaaccaaaagcataatatcatggaagaaataatagataaattctatgaagaaattgaagaacatatagaagaaaagaagtgttatacatcacaatgtaaccatttagtaaaactaacaattactaaaaaatgtattggatgcggagcttgtaaaagagcatgtcctgttgattgtatagatggagaattaaaaaagaaacatgaaatagattataatagatgtacacattgtggcgcatgtgtgtctgcatgtcctgttgatgcaataagtgcaggagataatactatgttatttcttagagatttagctacacctaataaggttgtaattactcagatggcaccagcagtcagagttgcgataggtgaagcttttggctttgaaccaggagagaatgttgaaaagaaaatagcagctggtcttagaaaactaggagtagattatgtgtttgatacaagctggggagctgatttaacaataatggaagaagctgcagaacttcaagaaagacttgaaagacatctagctggagatgagagtgtaaaacttccaatccttacttcatgttgtccttcatggattaaatttatagagcagaattatggagatatgttagatgttccttcttcagctaaatctccaatggagatgtttgctatagtggctaaagaaatatgggcaaaagagaaggggctttcaagagatgaagttacttcagttgctattatgccatgtattgcaaagaagtatgaagcttcaagagcagaattttcagtagatatgaactatgatgttgattatgtaataacaacaagggaacttattaaaatatttgagaattcaggaataaacttaaaagaaattgaagatgaagaaatagatacagttatgggagaatatactggagctggaattatctttggtagaacaggtggagttatagaagcagctacaagaacagctcttgaaaagatgactggagaaagatttgataatatagaatttgaaggccttagaggttgggacggattcagagtttgcgaacttgaagctggagatataaaattaagaataggtgttgctcatggacttagggaagcagctaagatgttagataaaataagatcaggagaagaattcttccatgcaatagaaataatggcttgtgtaggtggatgcatcggtggtggtggtcaacctaaaacaaagggaaataagcaagcagcattgcaaaaaagagcagaaggattgaataatatagatagatcaaagacacttagaagatcaaatgaaaatccagaagtacttgctatatatgaaaaatatttagatcacccattaagtaataaagctcatgaattactccatacagtatatttcccaagagtaaaaaaagattagaacattaatttgagtgtgatttaaaattatggaaaaacctcgatgctaaatatcgaggtttttttaagaattatattaaaatatagaatatattgttttttatagtttattatttgaaagagtatttttataattttctttacatatgcaattgaaatttataaaatgaatgtgtacgtgtttttcatatgattatgagtatatttaaatattctttattcaatgttaaattttattatatatttaataagtatctttcattaaaatattttgagagaaaatcagattcaattatatataatacatttatattttgtataatgaaattatgcaagttatagcataaataatagtgtttgtttatatatctttagctattttaatttacttataaaatgaagcaatattaatattttatcacctaataaattgattaaataatgataatattattatttaattttacttaaaattaataaaagagattgtataattattatcaattgataaaagagtagatgttgattattaactttttagtagtaagataacataatttgaatttattcaagaaagactacaattgttaaaataaggtgagtaatattaaaattaggttaagttttttaaaaagagtttaaaaatgttacaaaatagaatatacttgttactggattatgatatttaacaatatgtcgaatatttatattttatagggagatgtgataatatgtttaatttaaatccaaaagaagataagttctataaaatgtttatagaagctgcacaaaatgtagaggaaggtgcaaaagtattaagaaaaagcctagactcattatccaatattgaacttaatgttagcaagatcgaagaattagaacataacggtgatagattagtaaatgttatggttaaagaattaaatgattcatttataactccttttgatagagaagacatgtacttattgattaaaagattagatgacattttagatttaatcaactcaacaatacatagatttgtaatgtttaacgttactgaaagtacagaaccagcaaaatatttagctgatatgataataaaatctacaagactcatatctgaattaatggatgaacttcatttaatagctggtaaaaataatataaatgaaaagatactaacaataaaccaaatagaaagtgaagtagatcgtttatttagaaatacagtaggtgacttgtttagaaatgaaaaagatcctatagaaattataaaatggaaagaaatatatcaaatattagaaaacactattgataagtgtgaaaaaattgcaaatattgtagagggagttgtcattaagaatgtttagtactatgactataacagtattaatagtaattacagtattaatatttgactttatcaatggattccatgatacagcaacagcggtagctacttctataacaacaagggcacttaaaccgcaaacagctatagtaatatgtgcaatttttaatttcattggtgcattcgcaggaacagcggttgcaaaaactgtaggagaaaacatagtaagtcataattctatgcctcaatgggttatattaggagttttaatttcagcaataatatggaacataataacatggtattttggtattccaagtagttcatctcatgcgttaataggtgcattagttggcggcggaattgcctataatttgagctttgatgtagtaaattggtataatctttttcatgatgtagtaatatggatatttattgcaccaattattggtttcacagttggatacatattaatgatattgctaaattggatattaaagccatttaagcctggaatagtaaataaaatatttttgaaattacaagttgtcgctggttcacttatggcattaaaccatggaagtaatgatgctcaaaagtctatgggattaataactatggcattattaagtggtggaattataagcacatttgaagtaccaacatgggttatagcatgttgtgctgtagccatggctcttggaacagcgtctggaggaaaaaaaattatcaaaacaatgggaagtggaatggcaaaattaacaccagtaaatggatttgcggctcaaacaggaggcgcagctgtaatatttttagcaacactatttcacgctccagtaagtacaactcacattatttcaacaactgtaatgggagtaggagcttctaaaagaattaaatctgtaaagtggggagttgctcaaaatatagtttgggcttggattttaactattccaataacagcagctctttcagcatttattatatttatagctaagctatttatgtaagtatttgagtaataagctcgagaaacttacgctaaaatcgtatatatgcaatagatgatattttaaaataataaacctatagatttcatataactgagatttataggtttatttttatattatatgaataatttattaatataaagataatcaatgtaatattatatggaggcagaatgagcagtttgacttatgaagagttgatacttctagacaatctgatatatttgaagtgggatataaaagaaaacgaaaaacttataaatcttgtagataatttattgaaaagtgataattttgactatcttatgaacgctattggagattgtataataagaatggatacaaaagaatggatgatgatattaaatcaaataaaagttaaaccaaatttaaggaatctaagaattaaaaatgtaaatagttataataatggaatggagtatgcatgtttcttaagcgaagatggaaatgcaacagtaatttttaggggaacagctacaacaaaagagtggaatgataatggcaaaggtgcttatgaatatgatacactggaacaaatagaggccttaaaatatataaatagccttgaatatagcgatattacggttactggccattctaagggagggaacaaggctcaatacgtatcaatattttctcctaaggtaagtaaatgtgtttctattaatggacaaggattttcaaaagagtttatcagtaggtatgaagaagagattagcaaaaacaaggaaaagattatatctataaatgcaaaatatgattatgtaaactgtttatttaattcgatatcagaaaagaatatatatataaaaaccgaaattcagattaacccatttgattaccataaggcaagtgtgcttttagacgaaaatggcaatttaagagatgagacaaacgaagctgaattttcaaaaataattaattatttttcttctagtataatatcaaatttgcccgataatttaagatatttagtgatagatggcatagtaaatgtaatagagctcatattgtgtaggacggatggtaaggataatctatttaaatcattaggtgaatatttaataatgttttgccatgatgattgttctaactataaagaattttttagtataggatatgctgtatcagagatattaatattaccattattcttttggaaggattttgttattatagaggaaagcaattcaaaggaattgcttaataatgtagtagtaagaatgaagttattagaaagtatggcggtaaaaaaattgcaaataatggataagagccaaacagagttaatacagagcatgtcgagttcagttgatgagctaatatataggattgagaatgaaatttagaggtataaaaaatagtattgaaagaaatggagtaaataaatgattaaaaatttattgacattatcgggttttgctttaatctctacattaatatatctagataataaaattataaaattatctaaatatgaaataaaaagtaataagattccaaaagaatttaataaatttaaaatagttcatttatcagattttcataactataattttatcgggaaagataattcccaagtaattaaaaaaattcatgctgaagctccaaatattatcgttatgactggagacatggttaataaatatgataaagactttagcattttttttaagttagcagaaactttgagtaaaagttataaaatatattatattataggtaaccatgaacagagattaaaaaagcacgatttagattttatcataaaaaggctgagtgaatttaatataactatattaaatgatgaaaaaatcactattgaagaaaagggtagttgtcttaatatttatggcataaatatccctctttcattttataaaacaagaaataggccgtcaaatatagaagaagtaattggaaaagtattgaaaaggtgcgattccgaagaatataatatattattagctcacaatccgctatattttaaagcatatacaaaatttgatatagatttagttttatcaggacatgttcatggaggaatgatcagattaccatttataggtggaatactttctccagaaagaaaatttttccccaagtataacagtggaatttatgcaatagatatgaaaaagcttattgtaagtagaggaatgggacatagtaaacctggtataagattatttaatatgccagaaatattaagcataactttaagaaatgaatcctagaaatttgaaaattttttaaagtaaacttagttattttattttgctaatgcgtttaaagagggttgtaagaagattctaaatacctctggtactgtataaaatcataacagatacaaagactaaatatatcacaattttaattaaaaactggaggtaaaatatatgggaaataaaatggtagaatttttagcggaaattactgaaaaatcattgcaaattactccagatatattagttttgcaatttactattgttaattcgtgcattataagcagtagtggtagtaagtgggtgattgtagacactggacttgagaattcagctgagtatattattaaatgtgcagaaaataaatttggaaaaggaagctcgccagaggctataattcttactcatggacattttgatcatgttggttctgttattaaattggcggagtattacgatgttccagtatatattcatgagcttgaaattccgtatataactgggaaaaaggattatccattagcagatcctactgtagatgaaggattggtggcaaaaatatcaatgacttttcctcatacaagtattgatttaggaaaatatgcagctccgcttcctaaggattatagtgtacctggattggatggatggacatatattcatacaccaggacattcagaagggcatatttcattattcaatgagaaaaatagagtccttattgttggcgatgcttttgcaacagtgaaacaagaatctataatgtctgtcttaactcaaagagaacacatagatggtccgcctaaatatctaactacagactggaagaaagcagaagaatctgtaaaattactttgggagttaaaacctaatttggcgattccaagtcatggaaaacctatggaagggagcgaacttagggagcatctaaaatatctcatagataatttttatgaaattgcaaagcctgagcaaggaaaatttgtttaatttgattatttatacagtattggaagtatcatttatatactaattaatattacatataaaaaatataatatatttttataaggtgggaacaatataattacacccaaataaaattaattttttaatttaaggaggtaattatttatggtacatgataaagaacattcagcaaaagagggttctaataacagaagtataggtggatggattgtaagattggttttaacagttgtagttttaggtataacatctttcttaacacctggctttactattacaggaatgtggtcatttttaatagcagcggtggtaataagtgtaatagattatctagtagaagcgtttatgggtgtcgatgcatcacctttcggaagaggtctaaaaggatttttcatagcagcaataatattatatgtggctcaattttttgttccaactatggcagtatctatccttggagcaattatagctgctttggttatcggtatattagatgcagtattacctggtaaagtaatgtaagtacttaataaataataatattttcacaatattagggatgattattttataatcatccctataattttatatcttgttttttataaaacataaatatataattttatattatttagtgttgaaaaaggagaattttatggatataaatcatatacatcatattgcgataattgcatctaattatgaagtgtcaaaaaacttttatgtaaatatattaggatttaaaataatacgagagaattataggaaagatagagattcatataagctagatttaaagataggaaatagtgaaatcgaacttttttctatgccaagtgcgcctaagagaccatcatatccagaagcatgtggcctgaggcatttagctttccatgtaaaagatatcgaggaagcaataagggagttaaatgaaaaaggaattgaaacagagccaattagaatagatgaatatacaaatagaaaatttactttttttagtgatccagatggtctgccactagaattgcatgaataagcacacgcgaaaataaaaattattaaggatggtatttgtaatgaagtatgactttgaagcactagtatctcgaaataatgtaggtgcaagtaagtggaatttgatgagaaaaattaataatgatgttagtgaatctatagtacctttttctgttgcagatatggaatttaaaaatccaccagaaattattgatggacttaaagagtatatagattccagtattatgggatacacagaagctactgataagtattataaagcagtatgtaattggatggaaagaagacatagatggaatatagataaagaatggattactgagttctcaggtgttgtgccagcactatatacaattattagagcgcttactaaagaggaagataatgttttagtgatgactccagtatattatccgttttataaagcaattacagataataatagaaagataataaaaagtgaattaatacttaatgaagatcattatgaaataaattttgaagatttcgaagagaaggccaaattagaggataccaaactactaattttatgtaatccacataatccagtcggacgtgtttggagtgaagatgagttaaaaaatattggtagaatatgcagtgagaataatgttattgtagtatccgatgaaattcattttgatctaataatgcctgggtttaaacatacagtttttgcaaatatatctgaggagtttgcgaataattcagttatttgtacagcaccaagcaagacttttaacttagcaggtcttcaagtttctaacattattattaaaaataaaaaaataagggataaagtcaggtttgaacgtagaaagtctataggaaatttaggccttaatatttttgggtataaagcatgtgaaattgcttataatgaatgcgagcaatggcttgaagaacttatacagattataaatgagaatagaaaagtcgtggaagacttttttaaaagtaatattcctgaggttaatataataaacctagaaggaacttatttgcaatggctagattttagaacattggagaaggatcataaagcattggaaaaatttatgacaacagaagcaatgtttttcttagatgaaggttatgtttttggcgatgaggggaaagggtttgagagaataaacttagcatgtccaacaagggtgcttgaagaagcattagatagattattaggagctgtagaaaggtgctacagatagacatgctaaatatcattctaaatagttattttattcaaatccaataaaaatgaaactatatttatatgaacaattatttatagaaatatagttttaaagtaatatatgattaaatttatctatgtatatagaaaaatatgtttctatatacataggaacatatataaatatttataggaataatgctggttaaagaggataaaacttataatgttctcaaaaaagtattataaggtagactaccatagaaaaagcactgaaaaactattattgacaaaaattatactataagatatcataagtgagagttcaaatttcatgtttaactgtttaaagttactcattaaatttatgtgagttaaagtaataatataatatataaaagcaatgaaaaagaggagtaaaaatttttaggcattaaaaggaaactcatgaaaaattgaggagtacagttcttttggctaaa

(The sequence listing continues in the following parts.)

1. A Clostridium beijerinckii SIID27451-B 11 strain (accession number NITE BP-02951).

2. The Clostridium beijerinckii SIID27451-B11 strain according to claim 1, having genome sequences shown in sequence numbers 1 to 5.

3. The Clostridium beijerinckii SIID27451-B11 strain according to claim 1, having a 16S rDNA sequence shown in sequence number 6.

4. The Clostridium beijerinckii SIID27451-B11 strain according to claim 1, which produces more butyric acid and less lactic acid and acetic acid in a culture solution after anaerobically culturing the strain at 37 ° C. for 72 hours, compared with Clostridium beijerinckii NBRC 109359T, which is a type strain of Clostridium beijerinckii.

5. A method for producing butyric acid using SIID27451-B11 strain according to claim 1.

6. The method for producing butyric acid using SIID27451-B11 strain according to claim 2.

7. The method for producing butyric acid using SIID27451-B11 strain according to claim 3.

8. The method for producing butyric acid using SIID27451-B11 strain according to claim 4.
